United States Patent Application Publication US 2026/0191916 A1 - sequence listing, part 31

SEQ ID NO: 89 - DNA, 6334521 bp, Bacteroides thetaiotaomicron (residues 1-2,111,507 of 6,334,521)
  source 1..6334521: mol_type = genomic DNA
attgtgaaaagtaggagtttgcttgtgacttagacaagcagtgtgagagcaaacacttgctctcacactgctatcaccggatctctaatcgctgaaacttcgatgaataaagggatacagacgaattgttggagcatgagagcaaaaccactatcaaatcattggagagggaattctaaagaatccttatgtcaaattccgacagttaccccaattgcctttatagactcttatatacagaaaccataaaaaaatccatttggatgtcaggaatgacccaccaaacggattttgcgtaatactcttatagagatatagggaattatgctttacgtcccatttctacgacctttaccgctaccattatcaacggcagcgagtatcaaaatccgggatattaaaaaatgatcggaaaacatcttggttaatatgcatgaagggtacacttcacacacaaattgaagtgtccccttcttagcaacttagttatttatgcttctcaattactatttcattcttattttcaactgtttaccttcatatttaacaacctttccgccagtactttcctccactcctattccggcattcttgtcaaccttcaccaatctcaaattccggcattgggtcattcccggataattacctttacggtcggaaatggtcaacaatttctttttgtcatcccattttatttcaaaattcgaacaaactcccttctcataattataattatcgccttcatcttcatacaccgtaaacgaagaatccgctcccggataaatccgtatttcccaagctgcatctttcttttccgatgtatattgcacaaccggccccattggaacgatggccccctgacgaaccagcaaaggaatacggtcgattgtcgcttccatagtaaccctttgtccgcctttatatttcttgcctgtccaaaaatcaatccagttcgcaccatcgggcaaatatacttggcgtgttttggctacattctccaatggctgggagtcaaccgaataatacatcggagttgtgacgggagcaaccagaaaagcaggaccaaacataaattcatccttcaaatcagcaatctgcgtgtccgaagcaaaatcaaaagcaagcgctctggttatcgtataattatcggtatgaacttttcctgccaaagaataaatataaggtaataagcgataccgcaaatgaatcatttgaatcaaactgtcgtaaaagggctcaccgggtttgccaaaacgccacacctcacggggagtatcggtaccatggctacgaaatacaggcaagaatgcgccatattgaaacatacgggtatacaactcacgatatcccatatcagccactcctttattataatcccccttcctgaaccattgaccaccttttttagtaaagaaagcaccaatatcgactgtccaataaggacatcccgtagccataaagttcagtcccgccggaatcatccgggcaaaagagttccaggaagcataggtatcgccattccatgtaatagtagagtaacgctgctgcccggcataactggagcgagtcaaattaaccacacgcttgtctgaacttgtagcacgctgattctcataaatccccattgcatgatataaagaatacagctgacttcgttccgctcccaatacatcgctcagtagtttggtatttaactcccagcgactcttgtgactatcatctccataatgatcacccatatgagtccagtcagcatccaatggttcagaagcatcacaccaccaagcatcgaaaccattatcaaaaaactcattcttcgcatagctccaatacaacttccttgccaacggattaaaagcatcgtaaatagccgaagaatgcagaagtagattcttctgtttaaaatcagcgtgttgaggacaattcatggcattaggccatattgaaaccattaatctggcgtgcaaagaatgaatttcatctgccagtttctttttatcaggataatgtttcgggtccatactcattcgtccccattgacctctgggccagtagttccagtcctgcacaatcatatcaataggaatctgcctttggcgatattcttttaaagtattgatcagatcatcggaactgacgtaccgttctttcgactgaatatatccgaaaagatgaagaggcatcatgggtgatgcacctgtcagcaaacggtaattagccactaccccatccaacgtccggcctttcataaagtaatagtcaatctccttggctgcttccagttccacataactgccttccgaattgtctttgaataccatcccgcaacccgcatcgaacaacaaaccgtacccgttggtcgataccagcaccggaaccattgccttcagattatgctggcacaaatagagttcctttccccgaaggttcatataatcctccatatgtgagccaaatccatataaagcctctaaaggctgccagtcgaaatttatcctgtacttccaagtataacctatggtatcacgacgaagaatatttttcacttccttatctccatccgctgtcttctcaatacgtttggattgttcgtcgtatacgacatgctccatcaccttcttttctccaactctcggcagcttgccgtcttccctaagcaataaggaaccatccgtatttaaataagagataaaaccagtatttaaatcaatcttaacaatcaggctgtccgattttaagacacaactatcaatctccttaccagaggtaaaacggacagatcgggtaacatgaggcatacaaatacctgtgctattccccttaaatacattttcccccgtatattgtactctcacaatatccgaagtgacaaattcaaccttcaaaacaccttgctccaattgacaagacacaccattcactaaaaaagtaacatccttactttttgaaaaagcggcaaatgtattcattaaacctagcgaaaggagtattaaccgtgctaaagtgaattttcttattctaaaccgacttttcatatatatatattttgtgattgttttactgaacagactgcaactccgcattggtaagtgaacgtacccattcaattaccacaggttcaccacaagtatcgccaaaatccagagtcatggttgcattcgttaaagccttagagaatgagtatccattttttgaccggacatctgttattttaaatacatatatatcctcacccactttcattgctttgtccgaatcaaattcccaagactccggcgccgcacttatactataagataaagttaaccatttcttatttgccgatgccggaataccaggagcttttaccactatattgggataggcagaagaatcgtactgaacacgtttctgtagtttaacccccgaagagaccaatgacatcactccgttgactgcccgatatgaagctgtagagaagttccatgctttcaactgggtaagatcttcttctatccttcctctgtcttttccggtattcaaatcatcacccaaataataaagcagactgcccaaaccggtattgtcgcaagtaaaacccggtccctctggacgtacaagacctaaaacgattttcgtatagggcatttccagcccttttcgcagcacataatgattataggctatctcaaaaaccgaacggaaacgccccatgccctcttttccaaaagtagaaagatgtgaatattttccggttatatctttccatttaacaaagggaacatcgtaccccagatttgatttggcaatgtattcatatcctttcataatgcggttatccaaagcaccatacaaatcatcaccttgtgtccaggccacttccgccatatcagcaaagcaactgacaccaagcattacatgctgttggtcccgaccggcttcctgcgattgcccgctttcggcaatataattaggcagacttccgttatcttttccatgataaaagaagtcaattgcgtcatcatagagcttacggtcattcaaaaataccccgaaagaaagttgcgctttagctaccgcaattccccaattaccattagtatagggggccgtttgaaagaatttgcttaaaaccggctgaaacacctttcggaacatagcctctacacactctgtatcctgctcactccaaccattcggataatgagtctccatataagtgtagcgcataatctcagccgcattaaccagtataaatccctgcagtcccgcacaaagcggagcatcattagtaggcggtatctgccgaacggtacgagcataagctctgataatttccatggatttgtccgcatgggctttctttccggttatcttccaaagaagggcattgtaataggcggaattaaaatcacgttcactaggtcctttggtgtaaccatactttccatcccggcttattatttcgaagggtcctttcatctgatagtcggccctggcttccggtagctttgcgagaatttcatacgaaccataagccggttgggctttctgatcaactaaacgctttatccgctccaatgatttttcggagtggagtactccaggatgaataaactgttgggcgaaagcaccgggaataatgcataccaaattacaaagtaaccatatttttcttaatctcatagcaatgaaaagtttagtaaaagaacaactcccacactgagggttttgccgctccgggtttatttaaaaaggaaatttttaccgatttgcataccttggaaatcggaatatgaacgggtgacccctcaatcccctcgaccgtataatctgcaactgccacccagttgtttttatcatcagcagtttcaacctttatgaaatacctcttccaaggatattcaaaacgaatctccatggtatcgatatatgcactatccttaaaaatggctgataaataggaatcttcttcgccatctgttgcttcccaacgtgtagcatagctgccatccaatacatttttcgccataaagtctttattccgctccgaacttgataagatttcatccacttttatgaattgcctgtcatccttgtttagatcggggaataactgggcatgatgcggcacaatattattaatttcattttccggatcattgaaagtgagttcactcaaacaagtctgacggaaggctgacccatcatttaaaaacggccaacgatgccgatggtacaacatataggttttgttatcgtaagtaaacagggtgtggtgaccaggaccataaactttcaattctttatttgtagtcaggattggactattcccagcttcttcaaacgtaccaagtggatgatcgcctacagcataacataccttgtaagtatcatcaattgtttttccctccgaataagtcagatagtatttaccgttatgtttcagcatatacggagcttcaaaatagtgcgcaggcgttacttccaccggttctgtcgcaaaagaagccatatcgtcattcagccgggctccgaaacaatgaccgttagtccatccccaaccggatccccaataaagataggcttttccatcatcatcaataaaggcttcagcatctattacatgataatagcgagtggtatcaaacgatatcatgggtttatctcccaacacgttttcccatggaccaagcggatgggcagctttaccacaccagacctctgaccccacagatacatacatataaaacatatctcctttttgaataacagaaggcgcccataccatgtttttatgggagagagcagatgtacaagccgctttcgtaggccagttcaaccgatgaaacgtccagttccggaaatcctcggaaacccagcacggcagaaaatccgctccccacggatcgaccgtcgcatagagataaaacttaccttcatactgcaccagcgaaggatctgcaaaatatcccggaaggatagggttgttaatttccgtcatttgagtctcaactttctctttgggctgattacagccgaccaaaagaaaagagcataataaataaattcttgtttttaatgtcataaatacatccctgagtttaatgattaaagcaacgattacagcattttagcacttacaaagatacggataaataaaattaaccctatgtcatatagaatcataaactgatcgattcgataaacagtaatgttcccggctaaggaaatggttcaaattgtactacctcatgaggcaatgagtactatgaatataccgttttttttgttttctttgtagtagaaaaaccaattcctattaataatgagatatctgtcatccatcctagtattgcttttaagcataagcagttttgctatcaatcaatataaattccgtctaattgatatcgtcgatggcctgtccgataatcagatacgtggattgagcatcacccccgacggacgtattgctgtcagaaccgcttctataatgaacatctataatggaacgacctttgaatacttccattatgataaaaagcagaaatacgtatggaattataatcgccccaccaaagaatattatgacaatcaagggagaatatggatgaaagaactcggatatctgttgcttcttgacctgaataccaacaaattcaactacaatatatcggaagaattagccacattgggtattaccaaacatctgaagaatctctttattgacgattccaagaactactggtttctgacagaagataatacatttaccttttacgatacaacccaaagcaaacttattacgatagaagacggtcagagtgatttcaccaggctatacggaatcccgatggaactgacccagtacaaaaatctctgttggattgtatatagcagcggattaatacgctgttgggactatacctctcacgaatttatttttcaggaaacccgttttttgaatatcatagacgactttaccgatagaatatatattcatcctgactctgtggggaatatctggctgatgtataacaatgctgtttactttcaccacaggataaacagagactggaaagaagttgccacgattaaaggcatatccaattttttcacctgcatggacatggataacgacggaaatgtatgggtaggaacttccaaatccggattaagatatattgacggcaaaacattcgaagttactcacctgccaggcatgcgtctcataaacgggggaatacaggacaatgacatctacacactctttatagatcctaataatggcatatggataggtacactttttcagggattatgttactatcaccccagcatgcaaaagtttcagctaattcagaccattaataccggaacacaaattactaacgaaaccatacgctgtttcctggaagaagaagacggtactgtcttaattggctctggagacggtttatatcgtttctacccggaatcaaagaaagtggaacgattgtttaaagaacaaatcaacgacctgtgtctctctatcaggaaagaccatagcggcagaatatgggtaggaacttatctgggtggattcttttgtatagaaggaaagcaaataagacaatatctcaggtcatcaatcaatctggagaaagatccgaaccaaaatatttcaagatgcatctatgaagatacagacggccgattctgggccagtgtgacaggcggtgtaggacaaatcgatccggttagtggaaaaatgctatatatgttagccgataaatatccggaaataaaagactataccctaatctatcacctctatccaattaacgatgaaacattcgctgcactaggagataaaggtatctactattacaataccaaacaagacagcttgtatattcccggaactgacaatcccgattttgaacagaacattaaatatttcgggatattaaaagacaccaggggacttgaatggtttgctaccgaagatggcatcagagtttgggacaaaaccaaattatataagctcaccgtcactgaaggactacctaataatgaaatatcctccctgcttgaagacgacaatggagtaatatgggcttcaacactgaacggcatttgcaaaatcgcccccattcaatctaatgatacttataacttttcgatagtaaatttcggaatttcagatggattacaatggggaaaattctatgatcattcagctcttaaaaccaaagacggcacattatattttggaggagcacatggatttaattattttgatcccaacaaaatcatctacaataatagtaaaaacaaacctgtattaacagcattcagaatcttcaattccctcataaaagaagaagaaaagtataatggaaaaatcatattaaaagaacccataaataaaaccaagcaaataacccttaaatacaatcagaatttcattacatttgagttcgcaggtatgaattatgttaatccatcacagacatactataaatacatgctcaagaattttgatgaagattggaatgaaatttcaggcaatgaactgggcaaggctacttacaccggcctccgcccgggaaaatataattttattgtatatacagccaataatgataaagtatggggagaaataccctacgaattaaccattataattactcctccgttttgggctacttcttatgctataatcatttatatcatattgagcatagctatctttatttacattttaaaacgatatcaaagacggacgcagaaaaaaatactcaaggaaaaagagatatatgaacaggaacagaaaataaaactggacctaatgaaatttcaattcttcaccaatatcagtcatgaattccgcactcctttaacattaatattaactcctctcgaaacgttaataaaacagcagagcgatatggtattgaagaagaagctggattccatctatcaaaatgcacacctgctgcttagtctggttaatcagcttctggacttcagaaaactggaaataaaaggggagaaagttttattcaagacaggaaacataatacaattcataaaagatatatatctacaattcaaagagttatccactactaaaaatatcgatttcaccctagaaacatcggttgattatctcctgatcaattacgatcatgatatgatgtataaaatcattaataacttgttgtctaacgcatttaaattcactccacaaaatgggcatatacaacttactgtgaataaagcagacagaaacgataaagaatacatcatgatagaagtaagcgataccggatgtggcatcgacgaaaaagacttgcctcatatatttgaacgcttctaccagataaaagacgataatgcaccagctggaagcggtattggcctgcatctggttaaagaatacgccagattacataacggagatataacagtgagcagccaaattaacatcggcagtacttttacagtgtatataccggttgatttgcctaaaagcaatgataaaaatcatcaggaagaaaaagaagaaaagaatgaaataaacgacatcatacccaacacaaaagaaaaagacgatagaaaaaaactccttgttgttgaagacaacgacgagttccgcaattacttaaccgagcaacttagtgaatgctatcgtgtcattgatgcttcgaatggagaagaagctgaaaaattgatactatcggaatatccggatttaatcatctccgatttgatgatgcccaaaatggacgggatcgaattgtgtcaacgcgttaaatccaatatacaaacttctcacactcctttcatcctactaacggcccgtacttcggacgaatcaaaaatggaaggttatgaggccggtgctgattcttatatttccaagccattcagtttcgagctattgtgtatacgaataaaaaaactaattgagcaacaggaaaacaggaaaatgttattccataaaactatcgaaataactcctagcagcataactaccacatctcttgatgaggaattggtaagaaaagctctacacttcgtagaagagaacatcgacaatccggaatattcgattgaagatttaagtaaggacctgggactgagtaagactcacttgaaccggaagttgcaatctattgtcgatttaacgccactccaatttatccggtccatccgtttaaaaagggcggcgcaattactaaccaacagtcaatataacataaatgaaatctcttacatggtaggtttcaacaccttaaaatattttaattcacactttaaagaggaattccaaatgacacccagccaatacagggaaaagaataaagggtaatttcctgtactgattattatttgatctataactgaatgatgatataagaagcttctcgtttattttcacagaatatattcaacaaaaatacaattaaaagttggctaaaattgtatccctaaaatattattttttaaagacaaagcattagacgttttttaaatatttgtttaattaaaatgtaaaggacaatgaaaaattatttttatttattagttctacttttaaactatagctgttccgaatttgtagttgacagccagttagaaaaagaagaagtgaatgaaattttaaatgaggattcgattaagactcgcggtatctatggcgattattggattgaaggaggaagcagtatgacaggtaaaagtactgcaactttttatctgtgcgcagctgataattggtcgtttaattcctcagctgacatagatatatatgtatatggaaatgttgaagtgcaaggaaatagggatggatttattaatttaaatgcaagtaatctagtaagtaatggttatagatattcttttgacataaaagctttggatgattgtggtaatataacgattgaagttttagtaaatggatggcaggaacttaattataatattaacattgaggaaccaattccggcagaaattccgagcgctaatataaaatattgcagaactgattcagggtatttactcgttgaaatccctaggacaagtccacaatcaggtcagattaagatggagtggcaggatgaaccaataattgtcaatgcagcagcgtatacatatacaagaacagaagagatgggttataattatttgtattattatattcctcaatcggaacagattagtccaggtgaacctgagtttgttccagtatataggtatatatttaagccggttgataaaagtcgtcccatagattttttttccgtaacatttagaacaagaccaatatacaaatgtagcagttctaaagtatattcctatacaataaatacacatgtacaaggactcactgacagtgcatatggatttgttttacctgaaggtgatgcaacctacgatggagatataataaaatggtgatgttaacaaacatctcaagtgcttcttacttaagaaaagaaacaaaaatgtagtgaaaaatatagttatagtcattatggagacaacttttccttctttcttccattaataaagtttttaagtttttcaactagaaaacccaaaatatttaataaataattgaaagttggtaaataaagtacaaagaatcgaaggaagcaatctacttttatgcctcctttcatttaactattaatataatactagagtaaacatgaaaacaattaaattgattacttttatcattctatgcgccaaaatgttgcttccctgtatggcacaatcctcactggttgattccattcaagatcgctttaaagatcaattgatgctatttccgcaagagaaactttatctccatacagataaatctgcttatattgcaggagatacaatttggtttcgtgcgcatgtggtcgatgcagctacacacattcctgcaactgtgagtcgatgtgtctatgtagaacttatcaatcagttggattcggttattcatcgggttagagtttgtttgagtgactctatttattgcggttatatgccaattcccatatctgctccgcagagtagctaccatttatgtgcttatactcgttttatggagaatctgaatcaggattgcctgtttgacgtcgaattgccagtgataaatccggtcattacaggaaatatatctgaaacattgaagataaaagatgaacagcaggatgctacagcatcattgttcgacttaaatcaccaaaatgatattctgtcagtagctttatctccggtcgttttagctaaattatcacgaggagaaaagttatatttggccatgcattgccgtggaatcgtattttatgctgaagccctcgaaaaagaacgtgaacgctatttatttgatatcagtacctttccggcaggtgtagtccaaacattattactggatgaccggttacatcttctagatcaacatttattgtgtacgaatgaaagaaaaggtccggatataaagtttacaacagataaaccaacttatagtcgcagagaacaggtaaacgttgtcatgaagctgcttgatgagacaggaaaacctttgaaagggaatttttccgtatcggtgacggatgatgccagtgtatgtttggatagtctccgcatgatcgctccatatttactatgggaatccgatttgtctgctgaccggcagcagtggccacgctacaatctcaagaatttattaaacggtaattatcaacatccgggcggtcgttttgatgtatctcctgaaataaaaggaatcgcttatgatttttatagccgcaaagcaaaaacagatgctgaagtttcgatttttggcatagaatctctttttagcgccaaacaacatacagactctttgggtagattctgttttaccgggtttgattttcccgaaggctctacttttctcataagagcaacaggcaagagaggtaataaatcaatccagccgatagtggaaccggaagtattctatccattcaaacattctgttgtcaaccataacgctaactcagctaaatcttatgcttatcggaatgaaaaccaggaacggtttgattccttggcccaggcaatgaacagttatcagttggacgaagtcattgtaaaagcagattcagtaaagaagataggtaaatcagtatatcattcttttatgggaagggtaaaaacagcggaagaattaatgactccccatccgagatcgttgacggacatgttggaaagatttcccggagtatatataagcggggatagtgtaatgctgagtgggattaaaaatgaactgtttttcctggatgacatccctactacatttgaagatgtgaggaatataaacattgatgaaatagatgaaatagaagtcataaaagatgcgtcagcagcagtttttggaatgaaaggagcaaacggggctattctgatcatgacaaaacggggagaaataacacgccccgaacttgtgaggaacgtagtacgtgtatcccctttggggtatcagcggttaaaacgtttttatccggtctgttatgataccgaagagaagcaaagttctgtatcggaagataaccggtcgactctctattggaatccctgtgtacctataactgataatggagaagcttcttttgatttttatacctcagatagcgatacaccctatacaattctcgtgcaaggagtttctgaggatgggcgtattatttctttaaaacggaaaatatcccggactgtgacacgataaataacattaaagagccataccgaactctatttaagttgcgatatggctcttgtcttgtcaaaaaggatagtcaagtttcaaattacaagttcaaaccctaatgttgaatgatgacattcctctctacatcctgaaaaacaattccttttattccagcaaataagctctgacctcagccgcactgacagattttcctcgattactcttagtaaacaccagtttcaaataacgagcttgcataggttcaaaagatacacgtcctgtaatctctttgttgcttgaatcaccaaaaacgatcgttccgaccaatggagctgtatcggcatccatgccaacgtatatttccaccgtgtgaacgtccgctgtattgttgtcattccgcctatccaattctaattgtgaaactcgttcctcatcacccatatcaatcaccaacgcctgcggtaaattaccatttcctgtaccattgttccatatattgtgccacaaggaagaagaggtaccatctccgtcaatagccttccaaggctcattgttcacttgccaggaagtagctgttgccgtccattttgcacgatcaagcattcggaaagtgccataaactttcaccacacaggtagacgaagttccagcaccatcagccgccattgctgtgatagttaccgtacctgacgaaagtgccgtaacacgtccttccgcatcaaccgtagctatggattcatcagacgaaatgaatttaacagatttatttacagctgtttcaggtaataccgaccataccagttgcagtggttcctcacccttaataataaacaaattatccgagtcggcaaagattatatcactaaccgtttccggactagttatcttaatatcaaaagtggctacaatatttgtcccgtccgtagaagttacttttacttttccaactcccggtttcaagccactaatcataccttcactgtctactgtaaacacatctgtattcaatgattcatacttcaccgccggattcgcagcataataaggtataactaaaagcggcaatttagctgtagtacccatcttcacccgaaattccgtagcatcatcctgtagtttgattttctttatcttatgtgaattcaactgttcataaacagaagttgtaatctgtccggaaacaatgccatcaggatgcttttccgtagaaatagccaaataaagttcgcctgccaacaaagcttgttcttcagcagctgatagcccctgataagaagaaataacaaaacttatgccagcttcattagtgggattattattcaaatattttagaaaacgaatcgctccattgtgttgtgctcccttgtaaatcttaacaccgactatctcatcttctccttttacaaacagatcggtccacgacacaagcaacgtcaatgttcctgttcctttgtcataaaagccttctacctccccttttgtttgaaggtcagcctttatcttatacgtttccccttccccggaaaccatgccttcgccttgcacgcaaccgtgaaacagtaacatcaaggcaactatcaatatatagtttatagatttcatgtttctttattttttatttattaacattaatacccgggattctgaatcaatgcgccagactttgacatttcactttgtggaacgggccaccaatacagccgatcatcccatacatggttcagcacctctatacgacgataactaaagctttcgcctccatcatcaagtaccctgcgtgtaatctccattccatgactaggaccgcccaacacttcttttgcaatcttccaacggcgtacatcccaatagcgatgttcttcaaacgccagttctatctgacgctctgtctgaatcagcttgcgcatatcttcttttttgatgtcatccataacaccgtatttattagattctccttcttctatctcagcacgctggcgaatcatacgaatatactcctttgattcttccggagccaatgctccgtctgcaaccaattcattagcagtttctgcagcaatcaataaaatctccgcataacgcatcaggatagtcgggcgatagtcgtaggtttccaagccaccattatccaaaataaatttcatgcgatagtatcctgtagttgtcgcatttggctgataaataccatcttttatagcacttgtctcatcaggattcccggttgttaccatgtcaccagtatatgtcctcattaacgcatccttataagcattcatcatacgataagcaccattataagatactgttgccttcaaacgcggatcacgattcagatacatatcatcaccatcctcgtatgtatacttactccggctatcacgaatcggaaaaccatcagccatagggaaagcatctactagttcctgtgtaggaaagcctgtaagcttattcaaattagcaaatcgtgatatacgtgaattaggagaataataagcatccaatgctacacgattctggctgtcaccttgttcattcgaaagaaaatcgcaaaatataggttctttattcgtaacagcatcatgcataaacgcataatagaaccgaggccaccagcttttggccgctgtagtgttgtctttttgaccgggacgtagctcataccatgaattagcattattaaggtctataaatcttttaactgcatcataagcagtcttccaacgagctgcatcgtaatctccataagaaaccagcaagttcggatcatcttcacgtttacaattcactaacggacttgccgcatacagaagaatacgcgccttcaaagccagagccgccataccgcatgcacgcccttcgcttttcccatgaatgcttcctacaggattaacagtcccctgactgtaaatatgtcccgaacgctccaaataatagaaagcactgtcacactggtctactgcatacttaacactttctccatatgtagatcgaggcacatcgatcttatcattttcagtatacacccggtcttcaatcaaaggaattccaccataatgttttatcatcgtggctataaaccatgcacgaagaaagaaagcctgtcctttccaatattcaatggtggccttagtaagggtctcacccggtttattcgggtctgaactcagaatagccgctatcttcccctcattgtaattgttcatgaaaatgttgatagcgcgccatttattatacgtattgttccacgcatcgtttcccgcattattaacattgaccgttccttgagctaagtacatacccatgcttagttccgcccctcttgcctccagttctttggcaggaaaatcaagaccacactgcccgaaccgtttataactatgggaatagccgatttgaccgtaaaagccattgacaacacctgcaactttcgcactgtccgaatagaccttctcttgcgtttcagaaacgtctactttcttatcaagatactcatcactgcatgctgcaaaagtgacaagtccgcaagcagcaactaaaaaaaactttgtgatatatttcagtctcatattattatttcttaaaatgcacattgaactccaaacatataacttgcctgtgtaggataaaccgaactgctcgtattttcagggtccatactcagcttcgtcagattagaaaagttgagcagattgtaaccggtaacatacaagcgcactgctttcactatatcttttgtagtttttcgcagccagtcctgtggcaactgataggcaatttccgcacttctcagacgaatatacgaagcatccaaataccagaaatcagaaagatgggtattataattattattttcccaagtagtaattcccaaacgtggaaaacgagcattcgtattttgcggagtccagcgttcaagcatcaattcttgcatattgttgacaaaaggtataagattacctcccatattaggaatagcataatcgaatgctccttgccacaacatattaaacgataatcctttccagctacctccaagagtaataccataggtacaagtaggcgtatcgggcttagatatatatgttttatcagcatcagtgataaaattatcaccattcaaatcagcatagcgtaaatcaccgggttgcaaattgcttgcccaagctggagccggaataccttctttcaacttaccattttcatcaaaatcctcttgttgataaaagccaacgcacttcaatcccaacttcgtgcctatacgatgtccggtttgtgcctgataagggtaagccggtgcttcactaacatataccaccttatttttagcataagaaaaagtagtacccacattgtaactaaaatcacctatagaaccacgataattcaattcaccgtcaaaacctgaattctcggatttaccgatattgcgtttgggtagtgtttgtccgataatagcaggtatgtcaccacttgcaatcagctgatcataacgctggttacgaaagtaatctatcgtaaagcgcaagcgtccatcaatcatattcatatccaaaccaacatcaagcttacgttctttctcccaggtggcatcgacatacaccagttctccctcagttgtcgtatttccccagggattacctccccctttccaaatgacatccgttgtatttttatcttttccaaaagaattatcgctaccgaccagaccgtaagaggcacgcaacttaaacaagtcgaagaacgggaaagcactcttgaaaaacgtctcttccgacaggttccaacctaccgaaacagccgggaaccagccaaactttttctttccgacaaaacggtcattaccattataagctacattgaattccaccatatagcgatgtttaaaatcatatcccaaacgccatgtcatactttggtcattgtccgacaaattcttttgatttatgtatgactggcgactgataagatacaacatgtaaagatggtgtgtcgcattgaaagtgtgatcataattcaatctaccctgataagtaaccttatagttaaaggtatcatcatttccacctagtgaataagtcggaaattttttagaacctcctccgcgggcaatataagaattattgtccggatcatacaaataagcgggaagatctacactacgtgtcaattcacgtctttcattaaagttaccggcatatgaaaccgtagccattgccgataatccttcggtaatgaaatcaagtttttgttcggcgctcaacaatacattaaaattattcttataataacgcttgtaaccacaattggcataacgggcaattggatttaccggatttgaagtatccacaccaggatgagtggcatacgaaggcttaccattaggcagagtcaatggcattgcatagggagtcaatatgctgtaattcttaatctcatcaaaaagcgaaccttttactgaaccggcaggagtgttctgtgtctcaaaacgcccgttcaagtccaagcgaatacttgtagtcttagtcggtgtaaaatccaaattagaacggaaattataacgccggtaataatagttgttatcaacatcttcaccaggctgaataggagtataatgtttcatcataccgccttgagtataatatgccaaagatgtgaaatatttcacaaacttgttaccaccacgtatatctacggaaaaacgtgcagaagaagattgtttggcaagcaccgtatttacccagtctacattaggatgaccataaggatcaagaccattgcgataaaactccaaatcgctgggagaaaactgaagaaccggttgctcactcagcccatatgcatcatttaactgcgcttcattataaagagatgccgttgtataagcgtcaagaattgtaggcattttaatggccctattaataccaccttcagctgtaaagttaatggtaggtttgccttcctgtccgcgagtagtctttataaccaatacaccattggcacctttcaatccataaacagcagtagtagaagcatcttttagaatcgtaatactctcaatttcattagcactgatttgtgccaattgctcgtacgaatattctatatcatctacaattatcaaaggctttctgtcgccattcaatgaattacttccacgaataaaaaagtctgcagcatcggctcccggttgaccactacgttgcacggagaaaaaacccggcaagcgcccagccaacacattgtttatactacccacaggtacacgtttaatctcctctgctttaatactgcttgcagcaccagtcatagtaatacgtttttgctggccgtaacccaaaatcacaacttcatccaacccctttgagtccggtgccaaaaccaactttataaaagatcgattacccatggattcctccaaagtgtgataacctacataagaaacggtaagtttcccattcaaactcttcactttcagaacaaaatcaccatttacatctacaatagtgccatttgctttatttcctgtttcctgcacggtagcacctactagcggctcgccattctcgtccagaaccttacccctaactaccgtattttgggcgtagattgttgctcccaggaagaggaacaacaagaatagtatgatattcttaactttcataaatattctgtttacaaattagtaacccgggttttgtactatattcggattaaataaaacttcattatgatctatcggaagacgatacatacgatcgtcccagtaaggttttgctacctccatattataatcataatgaaaagttccatcttcttttttagttatcttcacgccatgcaatggtttggagtaaacgtcgttagcaattttccaccgacgaatatcccaaaaacggctttcctcaaaagcaaactcacaacggcgttcattacgtatcaatttaatgagttgatcataactcattcctcttttcaaagtataaggattaagtcctgcgcgctgacgtaccatttcaatcgacttatacactaattcatcattgataatacttgctccttgcgctttattcaaatattcggtttgtgcctctgcatacatcaataaaatatcagcataacgtaccaccggccaagaagaaactatcgaagagtggaaattagttttaccaaattgggtgtcttcttcattttcggctaaatgtctcttcaggtaataaccggtcttcgtccgatttccttctcgcgccgggtttatggaattattatctttcccaccttccgatatatctacagttgctttcaaccaacggctattgtgataaaacacagtttgtgtaagacgtggatcacgattcttataaggatcttgtggattatattcgccattctctttagcttcgtcaatggactttccattcttcattggaaatgcatctactaattcttgtgtaggactggtttgaccaagacagggacgaccactacccgcccaagttcccatatccatagaacccataggtgaatttttatatccccaattatcgccatagagagcgttaccatcctgcccttttttcatccacaatacttccccattgattgttgtacgactcaatcgtgttcgatctttttcaagtataaactgattcgtattaataattgtgcggcaaatatccgctgcttctttccatctgttaggatcattttcgggataaccaagccaaggttctgccgcattacccgtaccattaaccaatggacttgcagcatatagcaacatacgggcttcaagtcccaacaagccccacttacgtacatgtttccaattgctgtctattccttcagcaaaactattctttttttcatcaggtgatttacgctcaccaatatctgaatagagacgtaagttatccttcaccgcatctatttcatccttaatgtattggacacattctgcaaagctatttctttgtaatgtacgtagttcagggctatccatcgtaaacactttgtcataaatcaaagggactcctccataagtacgtaccaaaagccaataaaaatatgccctcaaagcacgagcctcattggcgtgataagatgcctcttcccaatccgaccaaggcactttctcataattctgcaaaaatatattacaataacgaattgccttgtaaagcaatgcccaactttcaccatacgtatccgcttttctatgctctaaaggaaacatattagtagtcgaatatccagaatttattaccgaccagttagcattggccctatcagttggaatcgcatcatcagtcaatacctccataggttgtccattaaaacggtccatacctgcaggtataaacgagtaaataaagttcaaccattgccttgcgttgtcacccgtataatcatcctcgtcccacacgtaaatatccgactgtatttcaagtggttcgttttccatatcctcacaggaggaaaaaaagacaccaaacacagccaatacaccaattaaattatgtatatatcgtttcatcttttatagttttatgcttataccaaagttaatagtacgcgtcatagggaaactgccgccccatatttcaggatcaatatctttgcgtacatcaaaaatctcagaaactgtcaacagattcataccttgcgcatagatgcgtacagaaggaatacctaacttgcgcgtcaacagcgtaggtaacgtatagccgatttctacatttttcaagcggaaaaaatcagcgtcatatatccagaatgaggaagtttgcctgttgttgttattactaccataccatacgcgagtatgagtgttagtatgattgtcgggagtccaacgtcctaaaacataagaagtaatagcaccctcgcctttttttcctgaaccgtccataaagtcaccgttcaaatacacttggcgattgagagtcccctgtgcaaatacagaaaaatcaaatcctctataattaaatccagcagaaataccataatatcccttagccttctttgaacctaaattggtctggtcgtgcatatcaataatatggtcaccgttcaaatccttataacgaatatcccccggcataatcgtactctttacagcagatggcaagaaagcatcataagcatcgatttcttcctgactttggaaaattccatcagccacatatccataggtcattcctaccggatctcctaatcgactcatccacggataagccttcggtagttgcggagaatattcgaatttagactgctcaaagcttaaattaccattaatgaagtaattgaaatttcttatacgatcttgccaagtaagtaccatttccgtacctgtataagaatatttttcacaattagaacgtgggtaaacattgccaagaatcgccgttttgatttcagaagtagccaccacgtcagagaacctattctgataataatcaaatgtaaaggctagacgatcattgagaaatcccaaatcaatacccacatttaatttcttagctatttccggattaagccgcgaagctgttttgttctcctctgtccatttattatcaaaaggaccaccatacaaatgaaccttagaggtgccataggactgtttatattcagcataatcacagatagcctgccctgttactgcataagaaatacgtggtttcagcgtactaaagatgttcaattctttcacaaatgattcattatgtccattccatgcagctcccacaccccagtaatcggcccaacggttgcccggagccaaccagttatatccaccgcgagtatatacagcctctgctaaatagcgatcatcatagttgtaattcattcgaccggaataatttgtataatttctcaaatatcccttctgtacattttgatcttggatttgattcagatcggctacaaacaaagcagccactttatgtttaccgaatgaatgatcatagccaaccgctcccttcaagaaagtaatacgataacgctggtctttatttccagagttaccttggtccttatcttcacctacctgctgataagaaccatcttctttatataaataagctgcaaactctttactacgagtagtaagatatgaagtcgcagaataataagaaccagtagcttccaaataaagaccatcaagcaaaaaatccattttttgcttgatcgtcaaatcaaaagacatatgacggctgtctttaaactgatgaccattgtcatataacagacctttcaaattctgatttgccttcgagtctatatacgaaccataagatccatccggattataaacaggataacgattaggacgtgtagtaagtatattactataaaatgaccgggtgcctgcagcaggttgattataacgttcttggcgtccagccagattaatctgcataaaagttgttgaagttactttgacgcctaaattagagcgtacagaaaatcggttagtctgtgcattggtattgtaactattcgcatcatttgttttaaaaaagccattctcacgataccagtcaagatctacaaagtaattaaagctattcgtagctccagatacattaaagttgtagcgatgaacaggagctgtattatttaacaactcatcataccagtccacatcaggataaaggtaaggattctccttattccggtatttctctataattgccggattataggcctcaatataagctcccggttcacggagatcgttagcataggcctcgttcactaatgttatataatctacggctccaagcaaatccggcagctttaacgctttttcaaaacctgtttcggcagtaaatgaaaacctaggacgacctacgttacctttctttgttatcacattaatgacacctgcagcagaacgttgtcccagcatcacggtagaaagtccatctttcaacacctgtacgctttcgatttgatctgggtccatagtgtaaaagtcacgttcaattccatccactaaaaataaattcgtacgtgaattacgtactttccatccataagcagctggcatatcaccaccttgacgataaatattcagccccggcatccttccttgtatagcccctaaaaaattataagtaggagtggatgtaactgacgtcccatttataaaaccaattgtttctgtcaattctcctttcttagaagtcccccgtaaacggtcgaccactatctctttatcttccggaccgggcatcgcacgtgaagccatctggacaatgaaacgtccttttttcttgtaacatgtctcctgagagtaaaaatcaggatgagagaaactgagtttcgttccctctgtaatcggtaaatcaaaatagccgtccacgtccgttaatgcttgctttttcgtccccggcacttggactaccacccctgataagggctttccatcagtatcggcaaccataccccgtatattctgaatctgctgtgcatacacagtagaagtaagaagcagggcacttaccatacagcattttaaaatctttttcttcattgtacaagattgatgtttaacaaaatattaattaacactaattttaatttgactgtataaaattaaaatatactaaatcatatatgcaagaataccttcacgttccctgtataaatgattttgtcagtccaacatttaaacaattactatacacgatgcaataaattactatcgcaccaatcatattgatgcattatatattcacttaaatgcacattcgaatataattacgcataatttttctgcctataaacagatgattttctactgtactcatgctcaattgaagttcttttgaaatttcacttagtgttttttcctcaaatcggctcatggaataaaccctttgacgttgttgcggaaatacacttaacctcattttttccatgaaaagtaaatctttaacaatgatttcttcttcaggtccacaagtaaattcaatagcattttcataggcgcacgatatcatttcctgttttctataataacagcgcaaatagtctgtcacaagattacgtgcgatagtgaaaagaaaagactgaatggtagatttttgaagcatattgtcataatccaacaaacgcataaaaacgtcttgcactagatcttcaacttcatatttacattttatacggcatctaacatatcggtatataaccggataatattctttatacgcttcttcaattatcgaatatgctttcgtttccatgcttttcataacatcactttaattagtcactgcaaatatgagtcatctgataaaaaaacacaaggacattttagcacaaaaaatgggatattcctattcatgagcaaaatcgtactatatatcacaaccattgccccttatatttcttatatttaatccgttcacctctcatcaccggaacaaaatgaatagccactccaccactaggttttaatttaaatttcatttgttgtgacgaatccgttagaaaactggaacatttaacatgagttgaggtcctctcattctcatcatcggtgtacacaattgccaaataagttttatccggctctaagaagtttaatgtaatccttaattccgcaacactttgatttaactttatttataagttcctgagcaacaaaaagttgctcaggattttgccatgtcagatttttcacttatcttagtgttgcaaatcaaaacaagcgtaaatcgtaacaagacatggcaaaggtacaaataaaatctgaaaaactcacaccttttggaggaattttttcaatcatggagcaatttgactccatgctttcacctattatcgaccagacacttggtcagagatgccgcagtatcatcggataccagtacagcgaaattattcgttctctgatgagcgtatacttctgtggcggttcatgcgtggaggatgtaacatcgcatctgatgcgtcatctctcgtatcatccgaccttgcgcacatgcagctctgataccatcctcagagccatcaaggaactgacacaggaaaacatctcatatacttccgataagggcaagacctatgatttcaatacggcagacaagctcaacgccttgcttataaaagccttggtttccactggtgaactgaatgaggtggaaacctacgatgttgatttcgaccatcagttccttgaaacagagaagtatgatgcaaaaccgacatacaagaagttcctcggctacagacctggcgtatatgtcatcggtgacatgattgtctatgtcgagaacagcgatggcaacacaaatgtgcgcttttatcaggctgagacccacaagagattctttgccctactggaagccaacagcatccgtgtgaatcgcttcagagccgactgtggttcgtgctcgaaggaaattgtcagtgagatagagaagcattgcacgcacttctacatccgcgccaacagatgcagttcgctctacgatgacttgttttcactgaggggatggaagacggaggaaatcaacggcatccagtttgaactcaattccattcttgttgagaaatgggaaggcaagtgctatcgtcttgtcattcagagacaaaagcgcatggatggagagcttgacttgtgggaaggtgaatacacctacagatgcattcttaccaacgattatgactcatcaacaagagacatcgtcgaattttacaacaagcgtgggggcaaagagcgtatattcgatgatatgaacaacggattcggctggaacaggctccccaagtcgttcatgtcagagaacaccgtattccttctgcttacggcattgatacacaatttctataagaccatcattagcaagcttgacaccaaggctttcgggctcaaggaaacgagtcgcataaaggcttttgtcttcagcttcatctccgtacctgccaagtggatcatgacagcaaggcaatacgtgctgaatatctatactgaaaaccgggcttatgcaagacctttcaaaacagaattcggataagaatcctttctttccggttagaatctgcgtattacctcaagtcgcatcgtggggtaaggggatggtggctacatattgatgttgtgctgttgctttttactgaaagctgctactaacgactcataaatctacccttaatcgtgtattggatgatagttgcggattttagggtaattatctcgttagaaccgttattattggtaataccgccaacaaaccaatcatcttttttccggcgtgccataaaaacttgtttacccggttctcccaaaagcacagttgaatcatcgaatactgttggcaaattttcaaaaaaagtaatttcaggctcattattataaaaagaaggcttatcataccaaaataatgtttgcaacggactataaaaaattactgacgctgctaattgatgagcgtgtgttgttttcagccgtttatcatagtaacaaatagtatagtccgcagcaccggaaatcaaacgggtaaatggtagtatggtattatgagttgcatccggaaactcttcatttccccgaatcccttcctgggtcaacaagttaggataagttctgctaaaacctgagggacgatattcatcgtgtatatttaccataagctgattttcagcggccaatttaactaaatcatgcatccagactgaccatcggtgggttgcatattgtacaaatccgaactttaaacctactataccccactccctatagagaggaaatagtgtctttgcatgtttttgtaaagcgtgttggttaacatataaccagacacctattcctctttccttaccatatgcaatcacttttgctagatcaattggtacagacacatagctcgcatccgcccgaaatgtagtagcatgaccataccagcctccatcaaataaaatatattggagattgtgttccacacagaaatcaatacactcaatggcattttcagtagttaacgttatttcccgcagaatcttgccgggtttcacccaactaaaatcaagtgtgcaatcttgattcagattcaggatcatatcattattatcaagcaacttacctggtgtttccgctatcaagatagctttccatggtgtctttccaggagtcacaacatcaaccacatcatacatatccgttgatattgtattttgtttctgaatattttttttaaagcggcttaaacaccaatcagctacatcagcatccgctatagaaacccataatccattgggtaaccctatcgtcataggacgttcataaattcctttccattcgggtatgcttaattgcttataaattccctgtgcccacgaagcacaccaagtctgtgcccccttttcgaaggtatattccgtatcatcagctatgactttatggtaaatagcattcggatgttcaggaaaaagataacggaaagcaactccttcattatagactcgaatttcaatatccatggaataacccgaattattactcttttcaaatttaagaagagcaccattccaattatctgtaatcaagccacgttcaccataaagaggtttccagttattcctacaattcttatattcgacggtacgaaaaatcaaatcgtaataccatctgtcttttcgttgaatatcttctgcgagtgccatttcccagaccttattatcaagttctaatcccattcgggattcttttatgatcactttatctttgtacgatatggaataataaagatgatattgttcgtcagaatccatccgctgataaaaatgaaaatgtatcaaactatcaggggaggttattcttatatgcgttttctctacatctactatagatccaaaaacagaaaatatagatagtatgaagaagctaaaaaataaataaattgttctcattatatataactgattttttattcatgaaaattgacttaccgaaacgttaggttttcaacatactttccaacttttatattggcatcttctagtataccggcttgttttccattaattattatattctcaaaagtaatgttgtttattaaacgctccttactatacccttcaattattgacggattttccccatatccagtataatatatatttttgactttaatattttgaataccacctccgggtgatacgctatactttggattatataataccctaaaattaaaaagctgaccttcttcaatattatcaatccaaatattttcaaagtttacattctgaacaacattatcatcagccacattaatagaaagacagccttgatataacctgtcatcttcatcatgctgtagtatatttatatttgagaaagtaatatcctctagaatgtttcccttaccatgccctccgatatttatcggatgtgccacatcggcccataaaatagcgtcagatacctttatattttttacattcccataatatgtccagcgatgtgcataaagagctatgcaatcatcagagtttcgcataaatatatctttaatctctacatttttgcaactcataaggtcaatgccatcgctccatcccttgcaactgaacgctttcaggttattaatcttcaatccgtctacttctcctcccaatacggtataatgatcaggattgataactgtaataccatttatctctatattcttactatgcgtaaactcaaatccacgtaccggattatcaatatatccccggcctataaatcttacattttcaacattattacagataaactttccattcacaactgccccaggagctagataaacagtagtattggaagatatagtaaatgcatttcccggcaaatcttttggacggtgaaatccgggagcaaaatagaccactccaggatcatctggattgggcacttctgtctctggttcgttagcgaatacatgcaggttgtttactctattttcattaatctctatcgagaactttccgggtttatccaaagagaaataaatcatattttcacgtactgtatactcaattccttttgacaaggggcgtatctttactttatgaatcatctgattattaggtcttatgcgaagttccaccctgccggagaagtcaaattgcaccatcgaggccggttgtgggttatccatatctaccaaaacacgatactcatatagatcctgccactcttttccgggtaaacgtactgaaactgtaaagtcatcattatgcttgctatagatcaactctttgggaataggataaatattcaatgtttgagctaccagtgaaaaaaagcccaaccatatcaataactgtaagcaaattattcttctcatttaacttctttattaggaatttatgggagcaaaaatgactaatttagatgtagctccttcattcatattgaagcaaaaagtagtatatttcctatcatggtgttatattattcaaattataccataaaatgtttttttatctcatactatatctctttatattatgattatcatagtcggctttaaacaataaacaccatccgtgccaacacaaaggtcaatattcagcaaacttcattgataccagactcttttaaagattaatattatgtatagttgcatataccccataagattgctccaaccgtcccaacttcgatcagcagaaggtatggtatattgggatgcctgcaaatattccatttcaagattatcactccaccatataaaaaaatctcctgaattctctgtcaataacccaaacagtccggtttgtgagaaatcttcagtaattgattttcatatcggcaagcaaacaaagatagagagataactccttactgtataggatgttttaaaacaaatactaatatgtttatgataaaataaagttcatccgacaaatacatgttttgtatcgttcagtgaaaccgctcttacagattctttgcccttctatttttcaattttataatgcaaggttgaataaaactcactccttcgggattatttattgcattttataggttaatttgaatcataattctttttttttaagcaatgcaacgtaaaaggataccccctgtgtcttttcagcctaattactctcaaaaaaaattccgttctttgtaaacctataatttgaaataaataatagttattatataaataattttatgaatagaaattttttattttgcaacattctgacagtaatgttattcttattgacagaagtacctttgtatgcacaaaacaatatcgtacatgcatacacaccatttaccatcccagccacaggaccgagcggagtagcctacccttcacatgtaagaaatgacgttatatccacacgatttggtgtgaaagtcgcaaatgttagtgtacctgccatccgttacgacaatactgttaacggaaatcaagggcataatatggatgttgcccgctttgcctcaaacagcttgacacctaaaattgagatcaatatcataggagggaccgagatcaacagtgttactatccacccagtgcgcttttatccacaaaaggcgcttgtgatcagtgctgacagaaaaacactcacattcgaaatggtgaaagacttgccatatgccatagtgattatcaacggggatgatccgcaagatgcctccacaactaacccgcaacttacgcttataaacgaccctctggaggaaccagcaaagcaaccctcgctttctgcccccaatgtacttaatttcaagacgttttctgaaaactatctgcgaaaaaatccaaatacggactcagtcggacagatctgccgccctgcggggagcgttacagacgctagtcttaatgatggaagattattcacctggaatcacgaagcaggtcggttcgtctcatatacaagcaaaagagtagccttccccaacttaagagcaagagacaacaacgacctctctgatgcactacaagcggctttggaaaaaatcaaaaatacacccgaactcaatacattatacatccccgccggtgtctatctctggtcgggacttaaaatacacaactggaacggagacgccaacaatggtggaaaacctcttttcgtttataccgacgaaaatgcactcatgataaaccgtcagaaagaatgtagagaagctatcgagcctgcaatatacattgcctactccagctatataacaatttccggtcgtggcatacatgatgggcaaggctgcctctctttctcaaccgacagaaaagacgcaaaaaacaccccacatcaaggtggtgtagtgataaagaaatcaaacaacatcacatttaatgatacatatatgcgagattctcagcaatggaattgggaaacacatgatgtcgtggacattaatctgaacaacataaaaggcctttctccctacaatcatggatggattgacggactcaatctttcaagtggcaagaacatcacagtcaatggctccattactttaggaaatgacgatgcgtttgcaactggtcattataatccctcgaatgaatttccgagacgcacctacactgaaaacaaatccatcaatttaaccaatacggacgcaaatccggcagaaatacgaaatactttcgcggctgcaggtgtctacaacaaagatcgcctcaactggagcaactccgataccgagaacatccgtattagcaatgccatcggatggacacgcttagcccactgtatacgcgcaggaatcaataccaagagcaacaatcctgaaaccgacacgtgcggcagactactaaaaggcttctattttgataattatcatgcaatagtcggcagaaatggtagtggagacatccgattcgtgaactacaatagttccacttcttggcctttatatgaaaagatcgaaattaaaaattgttcgttctggaaaccgggaaataaatgggctcttatccaaactatggtagacaacaaccagatgatacaaaattttgtgatgaaaaacatctattttgtaaaaccgatagcacatccatcttcaacattttcaggaatcatgaacctaaaagtgaagggactttacatcggagggcagcggatgccaaagtgtgaactttaagtaattctgtaaatccatctgccgattagattaacttgtttgaacactacgtttatcatgcctatagcagaagtttatctgaattaccgcagaaactgacgtttatctgaacataggagcgaatgctgcctacacagtgaatatctatatccccaatcattatcggtacgataatccatatagccatgctatttatcgtaccaatgattggggatattttccacacctttccacatttttccacacctccccaataatatcatttttttcaaccccgctgttaatctgtatcttatcttttcagcatttctttatatcctattggtatatcctttgtatcgactttatagcaaatgtatttttaaatataaaagtatgaagattaatcaaaggttaacattatgttttagcttactgttttgtttgttgagtatttcatatgcatccgctcagcaactgaacatatccggtgttgttatatcatcagaggataatgaaccacttatcggtgccaccgtcagtgtaaaggggaatcccaccaaaggagtgattaccgatatcaacggtcagtttcagttgtccgtggaaaccggaaccaagatgctggtcgcatcttatgtgggaatgaagacacaggaaatacgcgtcccccgcagagagaaagaactcaaaatagtactgatccccgaaacgatggatattgacgaagtagtagtaacaggatatggtaatttctccaaatcctcgttcacaggatcggccaatacgctgcgtacagacatgctgaaagaagtacccgtgatgagcgttgagcaaaagttgcaaggtatgactaccggtgtacaaataaccagcagttccggtcaaccgggtgccaaccaaagtattcgcatcagaggaatgggatcgttcaacgcttcacaggaacctttgtttgtcattgatggagtaccggttacttccgggagtatgagttccggtggtcctgatgcagcatatatgaacaactccaagaccaatataatgagtacactgaatccgtcggatattgaaaacgtgactgtaatcaaagatgcggcagcggcttccctgtatggttcccgcgccgccaatggcgtcatattaatcacgactaaaaaaggaaataccggaaaggtacgcgtggacttgaacgtatcaggcggcttctctcatgcggccgtcgacttccgccctaccctcaacggtgaccaacggaaagaactgctctatgaaggattgctgaattacgcaatagacaacggtatggagtctccgaatgaatatgccaattccaatatcggcacatatgcatataagccggccatgggatacacggactggcgaaaagagctgctccgcaccgctatgcatcagagttatgaagcttccgtctccggcggtaacgaccgttctacattctatgcttcgctcggctacaacaatcaagaaggattggccaaaaactccagcctggaccgttactctgcgcgcttgaacatgacgcagaaagtcggcaaatacggggaagtaggagcaaatatgatgttctcgcaaatgaatcaggaaatgaatgaggaacgcggatcatccatcaaccctttcttgtgcgtagccatgaccatgaccccttccatggtggtgcgtgatgaagaaggaaactacgtaggagcttatgacggcaccagcttgaacccgttgcgcgacatactcaccgattacaaccgtgtgcgcatgacacgtatgttttcaaccggttacgcagcgatagagccgatcaaaggtctcaaactaaaagagacattaagctatgattatactatccagaaggattcacgctactataaccctctgagctcggcaggtcctaaaagcggaagcgacgcccagacagccaaaggcttcattgaatacggcaaactgatctcatcgacctcactgaactatgtgcgtactttcgcccacaaacatcatctcgatgtattggcggcttatgaaatagaaagctaccagacagaccacgcttcgggtgaaaagtccaaactccccagtgataaactgacagaaccggataatgccgccgtattgaacagttttaagtctgccacccaagcctatcggatgatttcttatctatcacgactgaattatgactatgacgaccgttactacatcgccggaagttaccgtcgcgacggaagttcacgcctttcacccaacaaccgctggggaaatttctggtctgtgtcaggtatgtggcatttaggcaacgagaatttcatgaaagccgtaaagccagttctgagtgatgtcaaaatacgtgcctcgtatggtgtaaacggaaatcagcccggttcatactacggctacaaaggattgtacagttatggagaaaactacatggaggcagccggatcgtatgaatcggcacaacccaatgatctgttgacatgggaaaagaattacagcctgaatctgggcatcgatctttcatttatcaatcgtatttttgcgagtctggaatattacaaccgggataccaaagacttgctttacagtctccccatcagcgccactaccggatttaccagttatttaagcaacatcggacgcctgaacaacaagggagtagagtttgaattgcgtacgctgaatgttgtttccaacgactttaactggaccagtgttttcaacctgagccataaccggaataagatcgtttcactcaacggactattagaccagacgattgagggaacatggttcatccataaagtgggactcccctatcatacgttttatgtaaaagagtttgccggagtagacccgctgaccggttctgcccaatattatctgaatacaaaaaatgaagacggaagctacaatcgggaactcaccaccgacgctgccaaagcagaatctattccgtacaaaaccgctactcccaaagtatcaggaggattcaccaatatcctgaattacaaatggatagacctgacctttacactaacttattcactgggcggttactcattcgacaaactgggaacttatattgaaaacggcagcagttccatctacagttcacgatacaacttgcccgcatacatgatgaaccgttggcaaaagcccggagatcagacggataccccacgtttcgtatatggtgaaccggctacttccaccaactcgtcccgctatatccacagtaccgatcatttacgcctgaaaaactttaccctcggcttcacactgcccaaccagtggactcaaaagctgatgattgacaaagtacgggtatatttctcgggaaataatctgctgacctgggccaaatggaaacagtatgaccccgaaacacccgttaacggtgaagtcttttgtgaggctcccgccatgcgtactttcagtttcggagctcaattatcattctaacatccctatcattctaactaaataaacaacataatgaaacgaattcatatatacatacttacagcaatggctctactgaacagctcctgctcggcagactggctagaccttaacaccaccagctcggtagaaaccggacaggccatcgtaacactggacgatgcccagatcgctctgaacggaatttatcgtctggcatccggccatagctactacggagacaactattggtattacggcgattgccgtgccaccgatgtacaggcacgtatcaccaaaggagacggaaaacgtgtatctccctattacgaatacaatgtgctcgcttccgataatctgaatattgtactgccgtggaatactgtttataaagtaatacgacagacaaataatctgatacagaaaatagagtcgggcagtattcaaagcagtgatactaaagaattgaaccgcatcaagtccgaagcactggtgatgcggggactttccctcttcaacctgacccggttgttcggaatgccttatacgaatgacaagggggcttcattgggagtacccatcgagacctccccttccgatcccacacataaaccgtcacgcagcactgtagcacaatgctacgaacaggtagtcagcgacatgagcaatgcactgtccggattgagacaagagacatccaatggctatataaactactgggcagctcaggcattactgtcaagagtctatctgaatatgggtgaatatcagaaggcttatgatgccgctacggacgtcatcaaaaacaacggcggacgttatcagctttacagctatgaggaatatcccaatgtatgggggcaggatttccagtcagaatcattattcgaactttacatcactttatccgaaccttcaggaggtacgggcggtgagggtgctccgatggtttatgccaacgaagcaacggtcgactggaataatctgatcttgtcggaagatttcctgaacctgctgaatgaagaccccaaggatgtacgccactgcctgacaaaggaatctgtcatcgaaaacaacaccggacttccggctgccgccatgcacgagaaagtctatcttgccaagttccccggcaagaccggagatgatcccaaaactaataacatttgcatcatccgcctttccgaagtctatctgaacgcggctgaagcaggactgaaaaaaggaacggatcttgaagaagcacaaggttatctgaatgacatcatcagccgccgtaccacggataccagtcagcaagtatcaacggagacttttactctggacaggattcttaaagagcgccgcaaggaactggttggagaaggggaagtcttctatgactacttacgcaatggtctggctattgaacgcaagggcagctggcatcttgagactttgaaagcgtctaacgcacaaaagatagaagctaccgacctgagaatagctctgcctattccacaaagcgagatagatgccaatccgaatatacagcagaatccaaggtaagcaacgtcaattgatgtataccgtttccggaataagctggctatactcatgtgtttagcctcttcccgatatcaaagaaggtacatttcaccaaagaatgaaatgtaccttctttgtctttcagcagcagttcccactctccggtttctctcctccttagtgagcgaaccgataaaacaccccctttttcaccggcatctattgtaggcagaattgtttttcctatttttgcacttgacagaaaattattaaggctactttatgagaaacattatagataagatgaactctttgtatcccatttcggatgaaacgatacaaatactaaaagaaaatacagtattatgtcattttccaaagagacatcaactgatagaggctgacaaattttgcaaatcggcttattttattgaagaaggaatgacccgctctttctggctggtaaacggagaggaaataacgacttcctttgcgtgcgaaggagcgattgtcttcagcatggatgaattgtattataataagatgagtgaagagtttgtggaaacgcttgaggacgtcgtcgcatacagaatatcactaaccgatctgctccggctgtttcagaccaatatcgaactggcaaactggggaagagtgattcatcaaaacgaatacagacgcctgcaccgttcgcacaaagaccgcctcaccctgtctgcaaaagaaagatatgaagcattcaaacttcagtttcctcaaatgtgccagcggatacaattgggatatatcgcctcttatctgggcatcacactatcaacactcagccgcctcagagcatacaaataattcccatacacggcaagattttgatgcaggacaaatttttaaacttataaattccgtatttttgcggcttcttcaatgactaatactaatttgaacaataacttaaaacatgcaaaaaatctcttcctctgcatttgcagactctaaaccccattacgtactccttgacggactgcgaggggttgcggctcttttagtgatatggtatcatgtattcgaaggttttgctacaagtcccatagaccaaaaattcaatcatgggtatctggctgtcgatttcttctttattctgtcgggattcgttatcggctatgcttatgatgaccgctggaaaacaacgatgacccaaaaagagtttttcaaacgcaggttaatccgtctgcatccgatggttgttatgggagccgttttgggggctatcacattttgcatacaaggctgcgagcaatgggacggtacccgtgtttccatatcaatggtaatggtggctatgcttctcaatcttttcctgattccggctgttccgggcacgggtcccgaggtccgtggaaacggcgagatgtaccctttgaatggtcccagctggtctttgttcttcgagtatatcggtaatattttgtatgccctatttattcgccgactgtctaccaaagcacttacgatactcgttgtgatagcaggaatcggattggcttccttctcgatattcaatctttccggcaactatcatttaggagtaggctggtcgatgatcgactataacctgatcggaggttttctacgtatgctgttcgcattctctatcggattattgatgtcacgcatctttaaacctgtccatatcaaaggtgctttctggatatgcagtctgtcgattctcattttacttaccatgccgtatgtaggcggtgagacatctccgtggatgaatggtatttatgatgctgtatgcaccattcttattttcccactacttgtctatctgggtgcttcgggaaaaacgacagataaaggtacagccaaaatctgtaaattcctgggagatatatcttatccggtatatatcatacattatcctttcatgtatctgttctatgcctggttatggagcaaagagccacatatcactttctcccagtcatggccggtagccttatgtgtcttcttcggaagcattgtgttggcttacctttgcctgaaactgtatgacgagcctgtaagaaagtggttgagcaagaagtttctgacaaagaaataaggtaattatcataacagagaagggtgaacactccattatagttactcttcaataaggcattttgacacaaggtatataataaaaagaagctttcaatatcactgaattcagttttttatcgagagcttctttcattatataacctaaccagcattatattcattaaacttatccgaaagaaaagtcaaaatgaccttcattataaatttcaattaatccattcttgcgttcaatcactaccttgttttcacgagccagccaaccgactgccagagctgtgctttccacactcagatttactttccgggcaagttcgggaatcgaaattccatcagcttcattaagggcgtgccatactttgcctgcgttggcacctacgattttcttatccatagtagtctttttttagtttaataaaaaggaaaactaactcgttaaaaaagcaacgcacttttacgataaaacccaaaatgaagatcttttcatatgttttgaatgttatgtcaagaatagatataaaaaaacgtgagccttttcttcccaaatgtagcaacaggaactaccaatccctacaacacaaatgagaagaacgcccacgcaaagtatatgtataacaagcgtaggcgttcagtcatttttacgtgttgtaatatttaccctgagggtaaaagaaattggtagtttcgttactacgtaaaaaagctgaacgcttttcgatatttagtctcaatgaacgcacctttcaacggctatacaaatataataaaaatcagaattaaaagttacagtatccctccttttttattccattactattagattatcacattttttagcactacagtcgtaaaaagacattgttgagcacgattcggctatacttttatcagataaaagtaataaataaacagctataaaagccggaattattctccggctttcgtctttttctcacgataaataaccttatctctctgactgattgtccacaatccgtctataaaccgtacatttttcgtatcatcatcctccacgttccatgcataacctcccgaaggtaagccacgtctttccagaatctcattcggttgttcatcagagaagaaaagttccaaacgtgtggaatcgggactgaacacaataaaagcagaagcagtgcttccatcaacagcttccgtccggatacctttttcaaacaaccggatgcagtcttgctgcacttcacaccatacatatccggcagagccgatacaaccgtgttcatcccgatcgcctccaagtttgagagattgcggatactagactaattttgaggcctgcatccccggtgtatatttaccggtatagaatacttccagagtatcattcagaagcaagccatcgacttcttctttattcgcgttcatcgtactgaatgaaagagtatcattcttgtctgtaacaatcgccactgtattcatggtcgcatcacaaacaatgccttttgaacttgtcataccagacgagcaacttcccatgaaacacaaaactcctaatgctgccaatactgttctcatatcttttttatataattgttggttctaatatcatgcaaatataaaggatatatggaaaagatgttatcctaacaagcagaataacaaacaagtttgcttttatagaatgcaattccgcatatatttcattcatttgtctatatttgcattattgcgcagttgcgcaaaagaaactttaaaacagaaagagaggaattatgccagagtttgatttttccccaataacagaagggatttataatgttatagagacagaagaaaaagtattaatcagcctgccggaagagacaatcacacaaaaacgtaacaggcagaatcgtactatcaaacaaattctcggacatttgattgattccgcctcaaacaatcatcaacggatgatcaggttacaatacagtaaggacctgcttttctttcctgattatcggcaggataatgatctgtggatagccttgcaggattatcagcatacggactggaataatctgattcagttatggaaattctttaatctgcatatcattcaggtaataaagtcggcagatcaaacgaaactagatagttactggtgtgacttcgaagggactaaagtcactttaaaagaaatgatagaaggatatttagatcatctgaatctccatattcaggaaattcacgaactgatttagcagcctgtttgctatatgatatagtagaggacagagataagaagattaatattttcttatctctgttattgcagcagattgagtcattgtatcataagtcaataatccttccgtactaattttgatgcttctccggttttatttttagaatcccatagcctcttttaccaaagacatttcacgatgggaagtcagtttctccaataaaagaagggctactcccgaagcggtttgaggaccataagaagtgattatattgtcgtccaccactatcggttcattgacgattattgctccgaaactttgaagaaccttttgcttgactgcccctccgagatgataagtagtcgcctttctatctttcagcacaccacttttaccgacaggcaaagcacctacacaaactgttgcaatccatttcttccgggcatcaaactgacgaatcagatttaaaagcttctcttcataagcctcttcataaaagccgaaaacttcaaaacctccggggatggcaagagcatcatattcatcaacggatatctcatcaatcgtcttatccaccaaaacgggaatattaaaagaactgatgactttctcgttaaaaccacctgttaccacctcaacatcacagccaaaatctgttttcgcccatcccatcacatcaatgaaaccactaaattcaatcgtctcaaagcctttagcaagaaaaaccagtaacttcataatcgtcagtgttataaattaaacaaaccgtttatactgcaaagataggcagatacctcatgaaacaagaataatccgccaaaaactgctatatttactccatctttcacacataaaaagacttctgcaaatacagtgtaaggataaaattcacaagatagttagcaagaatagacaagcagatctgacagacggcagctatctttgcgattaaaaaccgtctgacatgaatatacaagaaaaaagtaaaatagaatatcgttccaggatcaatcgagtgatggactacattgacatacatctcgaccagcctctggaactgaaaagtatagcagaaatagctaacttttcgccttttcatttccacagaatattcacgttcctgataggtgaaacaccgattgattacatccaacgcctccgaattgagaaagcagcctgccggttacgggaaaatatggatatttctatcagtgagattgccgatagttgcggcttttgcacagtatccctttttagccgtgtattcaaaaagttttttggtttgacgccaagccagttccgtaaaatggagaaacccgtttatgcccaggacggaatcttatttagcaagaacggacaaatggttagcaagaatttgacacccaagcatgtattatctccccaactttgcagcgtcaaatttaaaatatcatattttatggaaacaaaaatcgaagtaaaagagatgccggacatgaaagctgtttattgccggcatatgggagcattcaaagagattgtaaaagcgtatgagaaacttatcaaatgggcagaacctcgtggtctgtatattccgaatgttacgaaatcggcaaccgtcacacatgatgatccttcggtaacggaattgagtaaagtgcgccagagtgcctgtatcatcgtggaaggcgacgtaaaaggagaaggtgaaatcggtaatctcgtcattcccggtgggaaatatgctgtgggacattttgaattgggtactgaagatttcgagaaggcatggaacacaatgtgcaagtggtttacggaaagtgggtatcagcaaggagatggatgtacttatgagttataccataacagtcaccggacacatccggagaataaacacattgtggatatttgtattccgataaaacctctttagaggatcatctgtcttaccggataaaaaacgaagaggatgtgtcaagactccccttttaacgaaatcatcttcgccacagatagttgtagcgaagatgattctttatttatgaagggtttcgacacatcctctttgatttattcagaatggtagccccatcggaacgatatgcttatcagatttacttcgcagtttgaaataacagactattgccattggtatccatccattccgccatcaagcgataatacgccggatattcagtcggagttatcaattgttttttcagtttcaaggtacggaatatctctattttatcctccgcctttttcactgtaacttccatgatgccgacagcattttcaatctttttgttagtcggcacaaccactggtttcattcctgcatcaatctttacgatataggtataagcctcatcgggcaaataccgcaaaagcaggttaacaggacgagttgtattcagagccgtcacacgcccatcataacttgcccatccaccgcgagcctgcggtaagtcgaatttccgataaccatcagccaatgcctttccggttttatcgctcacccgcaaggtatcagttcgtgaaacaacatgagaaaccttctctaaaattatcggctgagcattcagatcaactacagaaacaaaattctgtatatcagcaatccccttattggtcacaaacaatccgctgacagcagcaagtccggctgcatctttatcttctgttttaggaaaagccgcttttatctccgcacggatgcctatcgcttgttgcaaggcagccaacaaagcagccttctccgcttcagttccgtatgccgaacggatcacttcggaagccggacgcaaacggtatccggtttgcgacagggtcagacggcaatttcctaatccttctacataagcagtgagtaactcctttttttgttctatggtttgcgcaccgacagtcagcttctgtgccaattcggaaacatcctttccatcactttccagttgttgttttatcactctcagtgcatcagcctttgaagcataagtggacgccacaacagcctgtacattacctgccggcaaagagacgtcaagtgaataaggacgcggttgcacatttttcagtgtccaggtcactgttttcataccacccgccgtttttacaaccggagcagcttttccattcaaccattcataatgcagaggtttgctttcgggcactgacagcgaaaacacatattccctgattggggaaagctcttccacctgctcgcacacatccagttcgggcagatatcccggacgggtaacgacggagtagtccagataaatggtagctcccaattccagtcccgtatgaacgactaccatctctttcagaccattataagccggagcatctgccgctgcggaaggaagcacctcaaggagcgcattttcgggagtcttcacaatagtaccgtctttctgacgagtataagaatcgtgtatcttcagtgtctgaaactccggattgtaaatgataaaactctctccatacacacggttcatcgctgcatgagtaaacaaagtcagctctttttgcacacgcatttcctgactaccgtcagcgtgtaacgtataagccttgctcaatttcccaaattcagcttcggatgccgctttcaccggaaatgccaaaatcagcatcgccagcgtaactatataataatatgtatttttcattctgctctactttttaatcaccaaatattcaccatacgccttgtgggcattcacagcattgcggaaactttcccaatcggaagcctcataaacacgcttcttcaaagccagtctattgtggagcaacactttatttcctttctgtaccaacgaaccttcaaaatcggctcccactccttgcatggtttcatccttggcggcactcaccaacttgtatcctgccgggagctgaatcgtttcatccagttcgaccaaacgggaacaaccatccttgaaaccatacttacggttttctactgaagtatcgatccacatataagaacgtacctgattataaaggttattcatcaccatcggacggaaaaacatctcgccctctcctctcaaggcataatcgggtatttcataacgaaaagtgattttaataggtgcagcctgatagtatttgggattctttccatagtctacactcaacaatctggctttgggagagatggccaacagctgacgttccatcgtgcttttccattcgctctgaaagccggtggtaaagatgcgacggatattgctgtcactctgtccttcggctgtaagggtaaaagtaccgcgcaatgtaccatctgcatccaagcggttgtcggccttgatacgcacataatgattttcgggagccgaaaccggagtgatacacaaatcagaaccttcaggtacacccggcagatagttctgctgctgttcggcactgctccataactcgcggcagaaaggaacccatgtaggatcgagaggcatatacgtcccattgctcagtttcaccactgccacacaatgattaaaatggtcggcaggaatactttctacccgactgcctgccattgtcatggcaggataagcttcgaaaccagccatgcgcaagaacgaaatcagtgtacctgctatatctttgcagactccgcaacgatcagtataattcattttagtattatgaagtgtaaatccttctccttttcccatcgaaataccggaatagcggatgttatctgccacccaatgagtcagcacagctattttttccatttcggtcttcttgccttttatcagttcatctacttttttctgtgcttcgggcaatggatcaaaactaccataatcttcgttcactttattgaaccacaacgatttgtctttccactggggagtggtagacatcatcagtttgggagctgcatcgaaaaggtcgaccatgtttggctctttagcgaaaggcatcatatcatccatcgcaaagctatatttcttgcgaccgtcttcataacgcatggatgatgcgcactcaccttgatagaactgaaactgaagttccttctccatcggaatgcttactacataaactttacgtacagtaggagtgctgctccaaaaaggaacaatatcataaaactgtccgcgcataggcggaataaagcgtgattcatcttcattaccggctgcaagcaacgcataggtaaagcctttcttggctatttcgtaatccacaatatcacccggctgcaaggcgcccacttcaatcatgatttgtcttgcgccccaataaatggcacgggcaggagcagcataatcacaggttttcctgacatcaagttcatctacttttccattggcacgatggatggttacacgtttaaattcggcataagcagtcaaagggtcataatcgtatttaatcacccgattatccactgctcccctcggagtctgtacctttatcactttgcatacagcaaacgacccttgtcctgtaggctggacagataccaatgtgctatccaacaatgtcacacaatcagatgcttcgtaagtcttccccttcgcagtctgttcataaggtttccagctttgagccaatgacgtagccgaaacaagaaggcagtaaaggagtgatactgatagttgttttctcatgtttttcacttacattttatttatagaaacaaatgtaagtaaaatctttggaattcatttacttcatgctaaagcaattatcttttttcctacttgaatacaacaaatagttacatcaccttatttaaatcaacaaatactgtatttgaaatatttgaatgttcactccggatttgaagctagtttttaaccaatactccatttctcaccgagaaatgtcctcttggttttaaagaaacgaggcgttggtttaaaaggaacgccccgttggttttaaaccaaaaataagatttcataaccgtctgatatacaactttttgtaaaatgcacataaacgcccttcagagcatttaatttttcccaacaaatagattaaaatttaaaactatatttggagtgaagtatgaaatatgtctttacattttaattttaaatctcatgactataattgaaagagtgcaatgagaattaaaaaagagattgaaatgctgatgaaaataaaacttcttcgaacttctactgagatagaaaaaccatataattatggtgtaattaatgaataatagctaaatcacgaacagataattgaatattttagtattatctattccaaattttactatatttgcattaaaactgaacttaaagaatatgaatacattgtcagagattggtaatatacccgttgattttgctattttgaaatcgatgtatcctgaccacaaatcagtacataacaaaattagtgaattggaaaagtccggtatacttatcagactcaagaaaggtttgtatgtggtttcgcctaagaaaagcgggaaattattatctatggaacttatagcaaatcacttatatggtccgtcatatgtatctatggaatcagcattacgttattatggattaattcccgaaagcgtgtatatcacacaatcgatgacaacgaaacattcgagagaatttaaaaattcacttggaaaatttgaatatactcaatgtacaaaagagtattttgcaatcggtatcagacatgagattaaagataatgcagcttttctaattgcccaaccggaaaaagctttatgtgatttaattgtgaacacaccaaatcttaatatgagatttcaaaaggaaatattgacttatctagaagataatttacgttttgacatggatgccttcttcaaaatggatgcaaacatctttcaacaatgtgcattagtcggcaaaaaaaaatctactattaccaatataattaaaatcataaagaaatgaacaatatttttgaacagatgctttcacggtatccaatcatcagtgataaagaccgccaaaacgcaatatatgaagtgatgcaacaaataactctcgcaggactatatcgtgggggatttttcaacaaggcagctttttatggtggaacatgtcttagaatattccacaaactagaccgattttccgaagatatggatttctcacttcttaccactgattcttcattcaaactagaaaactattttccttctattatagatgagttcaagatgttaggaagagaaattgtaatcaccaaaaaagacaaacgtaatttcaataaggtggaatctgcttttcttaaagacgatacagaagtgtatgatgttgcatttcaaaccgaaaaaagtctaaagataaaaatagaagtagatacacaacctcctttgaagtttcaaacagaacaaaagctgttactacatccattctcttttatgacacgttgctttactcttcctgatttatatgcaggaaaaatgcatgctttagtattcagaacttggaataaccgagttaaaggacgtgattggtatgattttgaatggtacgtaaaaaatggaattaatttagatttcactcatttgcaagaacgtatccgagaatttaacggtatagaggtagataaagaagagtttctccgcttacttaagaaacgtcttgcttcaactgatataaaaatggtaaaacaggatgtagagccttttattaagaatactgaaaaccttgagatatggtcaaacgactatttcttacaattagccaacataattaaatttgaatagatttcgaatgactataaccaaagatgcctatattggacaacgatttactaaaagatcatcctatctttgcgacatatatatctgattaaacagtaaataccatgaaagaaccttttcaaataccagcttccgaagatatagagaatctgataggaacaggcctttacaatgtatggaactcgctctgccagctcatcgagaagagctacgaaatggagcaactttggaaccgtggcggcaaagcgtggacgtatgaatacaaataccgcaaaggcggtaaaaccctctgtgctttatatgcgaaggaaaagaccctgggatttatggttatcttggggaaagatgaacgcgccaaattcgaaattcagcggggacagttttcaaacgaggtacagatgatttatgatgcagctaccactttccacgacggcaaatggatcatgtttgaattaaaagacacaaaactattcaatgatatggaacggcttctgctcattaagcggaaaccaaacagaaaagcagagtaaatgcaaaaaaggaagctatttcttcatggcttccgctctcatatctttaggcattttctccagtgcataccgataagctgtacgaggcattgcagaacgatgcttcgtaacaaaatcaaatatctcattacaatgtgcttcactagcagccttaagcatccagccataccccttctgcaccatatcgtcacgatccatcatcatcgttgtcgctatttccataatatcatccaaaaacagacctttacgagccggaattatcaaagtaactgcagctccacgacgcatccagcgattgtcagactttgcccattctttcaaacgggaaatatattcgggaaacatttccacaaatgtgccaatcgtatgattacaaagcgtatcacacgctccccaattatccacgtagctcttcagccaatgttcgaaagtctcaatatcgcaaggttcataatttccacgagaacgatatgcccattcgcaagctacgactgcttcttcaagaaagcccgactgccacagttgctcacacaattgaaaaatatccggtttggattcaccttttacctcctgccaggattctttggctattccggatacttcacccatcctgacaccatacactttagcctgctctccttctttaaagaaatgagcggaagtcgccagcactttggcatctatactttcagtcagtctttttctgacggtatcgattatagtagtattcatattctttttcctatacttttttacttgtttcaaatcaaagactttcccaaagcaatttatgatcccgacaatgaaatgccaacttatcagtatccttcagccaagacaggtatgaacgaacagtacttcccaccaacacatattgttcgatagtcatcgtcagattgtacttttcaaaaaccttctgaagaatgctctcactatccaacggattcttgcaaatacttaacaacagatcagctatttcatatactttattcctgttgaaagcaaccagtcttcttatatccgaagtagcctctgcatgtgccggaacaaacatatccgcctgcatattctccactttgtccaatgtatcaagatattgggcaacatcataaatgaacgaaatctgatatttctccaaagtagcctgactgctaatacagtctgccagaaaaacagtattgtcaggggtacgcacccctatcatatcaaagaaatgtcccggaagaggtataatttccaattcatgaggaaaatcattatgagctatatcccacgctctgctttcttttgcaagcaaaaatttagttctcagctccttacaaggatatccgccatataaaaaagaaggttccaaaatcggataattagtaaaagcaatttcaatgccgtttgcgaaaaccggacagtcagtctgttgttgcagatagtgattaccaccaatatgatcggcattggaatgtgtattaataatggcttttatttcccaattattttgggcagcaagtttcagcaccttcttaccggcctctttatcattgccactatctatcaaatatacatctttatcattccgtctgtatattcctatttttgcaggacaattaatataatagctctgctttccaatctgttccagttcatacataataacttaactttaaataatacaaatatatagattaaaagggtaaaaacacgatattccacaaaatagatcaaacacaacagatacaaacatcctttttatatctttaccggatacagaataagtatgaaaagagaaatcctatatcagaaaataaccggcaccatcgcctggtaaatagacacaaccgtctgcccaatctttagagaagaaagacggaaacagacacactttctatatattaacaggtacagatttccggccgtccatgtcttatcgtgacaaatatgtatctttccgtgacacaagcgctatatagcaaaccgatttttcctgatgttagaaatacttcattaactttgcagcataaaacaaactatcaacacgatcatgaaaactacaattattctcattctttttatgtttagtttcaactgcctcatggcggttcccgtacagatcaaaggaaaagtacaggagaaaggtacaggcaacccgatagagtttgccgatgtcgtactaacgaagaaaggcgaagccgatcccgcttcatttacccatactaaagagaatggcgacttccacttatcgggtattgccaaaggagaatactcgttaatggtgagactgatcggctatgacatctacacacaaggcgccattagtattacctcttccgaatcagtgacggacttaggtgttatcgaactgcaacctttggaagtaggtatagccgaagtagtggtgcaggcagccaaaaggcaagtcatctacaagctggacaaaaagattatagacgcttcgaacaatctcatgagcagcggcggaacggcagtcgatattctggaaaataccccctccgtacgggtagatgtggatggtgaagttacctttcgcggaagcagcggatttaaggtatatatcgacgggaagcccagcttttattccggttcgcaggccctgcaacagattccttccacccagatagagaacatagaaatcattactacgccttcggcacgctatgatacggacggagaagtgggaatgattaacatcatcaccaagaaaaacaaacaggcgggtatcaacggtatagtcaatgcgtatggcagcacggctctctccaacggtctggatttcctgttgtcccaacaacacaagaagttacagtggcaccttgccgggcactggaacaatcccatccgtaagagcgatttcgaacaaaggaagacgactgttgttggggacaaaaccaccacctccctgtccgacggtccgcgaatcggaaagaattatcactatgggctgcggggaggcattgattacgcttttactcccaaaacctccgtcaatgcagaattacaggtggtatatgacaagtttacccgcgaaggggacctcgattatacagagacacattccaattccgacgcagcatccgccccatccaactattttagccgagacaaatatgacctgcattcgacggtcaatatcggaaaagcaggattctcccataagtttaacgacaacgggcataccctaaccggcagttttatgctgggttatgaagacaatccccttgaatatttccagagtgaccttttcgacaagaacgaacaacgccagcagggacaccgtgcgtgggaagacgaaaaacgctggacagtccaaggcaatctgtcctacagctatccgtatagcaagaccggtctgctggaaagcgggtatcaatatcattcgtatctggaagacggcgattacacgatgcaattctggaatccggagaaaaaggaattttattggcgggaggatatctataacactttctattttcagcggggtattcattccgtttatgtcatgggaagtgacagttataaagcatttgacgtgcaggcaggagtgagaggtgaacatacacaccaggtgctgcgaagctctattgaaggttcggaccgcacggtgaatcgttttgaagtgttcccatccgtacatctgggatacacgctgccgcacgaacagaagctgacgttcgcctattcataccgtactaaccgtccggaactcttttttatggagccttacattacttatcgcgattattacacagctgaaattggcaatccggatatccggcccgaatacatacattctttcgagctgaattacaaaaagactatgggagagcacactttgcaatccagcctgttctacagaaagcgtaaagacaagattgaacgcttgcgcgttccgtacgaggcaggagttacattagactccatgactaacgtgggcaatgactattcgttaggcgtggagctaagtacccagttgaaagtcactaaatggtggaatttggacgtcaacggaaatatttactattacaaggtaatgaataatattaattcgggaggaaaaaaggaaacgagtaccaattatgactttacagtcaacaacctttttcgggttcataagaatacccgtattcagctggacgggaatttcgtgggtccttcggttactacacaagggaggtcggattctttttggtttgtcaatctggctattcgtcagcagttgttcagtcctcatctgcaatcgaccctctcctttcgggatatattcaattctgcccgttacagaagtgacattgagacagccaatttacaatcgatcacacggattcaaccgaaattccctgtaattacgttgactatcagctatacattcaatgacttcaagcgcaattcacagagttcacgagacaaccgcgatttatttgaaggggtcaagcactaaaagacgatgtatggggtatcgccatatccggataaagatttgaaatggagaaggacaactatacaagtgccctatagttagtctcccaaattacttaattcgtcatgagtaatcacggcattcgtcgaataattctatatcgaagcctttttaagcctacctttgcaaggaaaacaaaagtaattgatagcaactatggaagggcaaatactcattttccgaacctcaataaggaatgcacgggatataaaacatatcgcggctcttttcaccctatgtccccaaatctacaaatggaatgtagatatggaggactgggagaaagtattaagaatagaatgtcaggacatcaccccgactgagatttcaaaggcactacgagccatcaacatttacgcacaggaaatgagatagagagagataacaatcagaatacaaccgtaatgccaggcatatctgtgaagttaaaaaacaaattataaagaaatgattactccacacgcaaagtattacctttaatctttcccaaaattttagggaactgccaaaagaacaacaacgtacagcagatggccgcagtcgcgtcagatatagcctcagctgcatacactccggttactcccataaagttcggcaaaattaatgccagcggaatcaacaggatagctttacgcaacagagcaatgaagatagagattcgggcctgtcccaatgcaacgaacatattctgacaggcacgttgcaagccgaagatggtcatgccacccaagaaaacgggcattgtccaacgtacggtttctatcagtcttgcatcactggtgaaagcagacgcaaccgtcgaagggaaaagaatcatgaaaagcatcaatatcaagttgaaggaaaacatcgttaccaatacaatacggaagcaatctttcacacgctgcttgtcaccatgcccgaagttataacttataatcggaacgaatccttgtgcaaatccgatcaacggtacactggcaaactgcatcgaactttgcagaatcgtcaatgcgctgatgtagatatctccaaattccttcagactgctattgaggacaaacccaaccagactctctgtacttgccataatgaagggggatactcctaaagctaatatggaaaggataattttccggtccagtcccatatattgtttctccaaaggcagagaggcccgtcgggaaaaaagaaaacttaccacccacaccgcactgcacgcttgggaaagtaccgtagccaaagcggcgcctttcacgcccatgtcaaaccagaaaataaaaataggatcaagaatgatgttcaataaggctccgatcagaactgaaaacatggcaatggcaggacgtccctgggcattgataaagctattcaaccctgtggatatttcgacaaatatcgttcccaagagataaatggaaagatagtcaaccgcatattccaaggtgttttccgaagctcctgtaaagaggagaataggttccataaaagtatatgcgatgacagaagtcagcaaagtaaacaatatcagcagaacaaacccgtttcccaatatctttccggctcgtacacggtcgccctgtccgagtgcaatggcagccaggggagcaccaccgccgccgacaattgccgaaaaagaagaaatcagtataatgagagaggtagtcacccctacacccgccagcgcatcggtgccaattcccggaatatgcccgatgtatatacggtcgacaatgctataaagcagattgacaaattgtgcagccactgccgggagtgccatcttgaaaataagcggtaacatacgttctgttcccagccgttcttcgtatttattgttcattccaaacttctttttctaaaatcggctgcaacatagataaaaaacttcaatttttatctatattgtgataaaaattgaagtataatctttccttctgaccacatgacagtttttggcatgtggcgccatttctaacattctgcctgcttcgtttctattcaaaagatatattttctacatgttctccaataaagataccggccatatctccggttttataccattttggttttccaggcatgtcgtctgtaatctttcgcccattgaccacaagattcacaaacctgataccggatatcttgtgattctcatcataccctgcaatgatcgacaagttttcacccgagccattataagtgacatccttaacaagcacattatgaatccctctgccggtagagacacaatacttcggattgaaactgattctgaaattcacaagctgtccgttacgaaaatcttcaatccgaatattctcgaacgtaatattacgcaccaatgtattgtcgcctggatttatagccagacatccctgataatcaatctgtttttctgcctgatcaagaatgtcgatattcctaaaagtgacgttctgcaccgtatccatgccattcggatctccatgtcctccgatattgattggatgagccacgtcagcccaaagtgtcgcatttttcaccaatacattattgcttccccctttaaatccttgtgtagaagcataaacagcggtacagtcatcactattacgacagaaaaccccatctaatatcacattactgcttgagaagacatccattccgtcgccccaaccataataactgattgatttcacattcgtcaactctaccgaatcgcattgtcctatggggagttgcgaaaccacaattccgtctatcctgacatttttagaacgtctgacccaaacaccggctcccctgccatcaggatgtacctcgcctctcccgaaaatattcacatcatgtgctccttccgtgaatatattgccataaacacgggctcccccgtcgatataaacagtagttcctgaagggacaaatagagtatcattaggaagattatgcacaccgggaccaaaataaatcagattggaccctttttttttcttgagagcccttttgatttctttatcggaaggacgaaatttatcaatcggattcgcaaaaagatgaagattgtgaaaaatgtctccattgacctctaccgagagattgcgaggatgcgaaagtgagaatgtcactgtgtctccaacacaatccggtgttatcttatagcttaaaggacgtactctcgcactattgactctctctttgttgctgatcactcgcacatctaccattccgtcaaaatcgaaataagcaatggaggcaacctctacgttatgacctttttcatcaaccctatcaactttaacaggataaacgtcaacaggcaaccacggtccgctaccctgacgcacttccacagaaaaatcgtttaaggttttcaccccggcaccagcagggtatgtgactacctctgcattaagggaatgcatagccaataacgccaatgaaagaaatatcgtttttggataattcatattctttgattttaaatttgatattgaaatttattaatcactctaatttgaatacgttttgactataaaaagcgcccaacagaagaatgaatatttttacttttataaaatagagaatggaatttattttgtaaaaagaattagtacgttataaagatataacaatcactattcacatccaaccaagatattcgtctgtttttatttataataacaaagcaagcatacaaaaaaacaggcttccggtttaaaaccaccggataaaatagaaatgatacttcagttatctttctgtcagaaatttatagatatattgattgatgaggtcatgctgttctgccgttccattctcacccatactgctatgtgtaactccatccagttttactactttcattctaaagtgctcctgctcctgtccggtaggtagcactcccgcatctgcctcatagtcacatcctctcaatgtatacaaacgtggcttcaaagttctgggcatgatcattctacgatggtccatagatacagccttactgatcagctgcgggtatttagtggcaaacagcattgtcatatcacctccattagaatgccctatcaagatgagttcgctccaattcaattgtggtttcaagtttttaaattcctgaattgtaaaaagtatattgtcagttcctcgttcccaattcggcatacgggtctgcatgaaatcgccttccatcgctaaaagaggatcatcggacaattcatgttgtatactaatcacataaaaacttttttcaaaaaaaaaacgtgtcaggtaggaataggtttggttcgacttactgtttttattcccatcatagccgtggctgaatatgataactttcgtttttgaatttactttctgcggctgataaaccgctatcggtatcactctgtttctggatatgtcaaacagacaagtagtaaactccgtttgtgaaaaacattgcactgatagtatcaatgaaattaataagatgattattctgcacatagtgattcaccggatatttattttgtatacacaatgatttgttgtcaaaacttttagtttcatatagagcattcttaattcagagttacaaaattacatataataaaagagaaatcaagcggaaatatgtaatcacagagagaaataaatatttcaaacggtaaataacaactcactgaaacgcgtcgtaacgaactaatcccagtctctcttaaaattaatttgctgtatgcaatcatctagtgctcggtttatataaccttattcgtctgacaactgttgaactttcgtctaacaactgtcagacgaataaaacattgcagcattaatcttacatccattaagcataaaaagtaaatctacgtaaactcggaactagttcataacggtgcaggaacgaacaaatatcgggcaacggagtaaatcaaagcagcacagaaaagatatgggaatgacaaattcaataagattattaatcaggccaacatcacaatcacaggaaacaacaatcgtatctcaatgtatttcgacactgaagaaagtgcggaagaattgctgcttagcaacgtttctgctaatcgtaaaaggagataggcgtaaaaattggcaagaatgtgataatagccgataatagtatcgttggctggggaagtatcgtaacaaaagagtttaacgaaccgaatgtaatcattgcaggcattccggccaaaattgtcaagcgagggataaattgggaccggagatgtattaataagtatttaaatagataaccttcattattttcgggatgaaatactttctcattcaacaagatatacctacttttgcacatgaaatcataatcaatggaacaatctgatcatatagacgtttttgatttccctatattccggcatatttatagggaaagggcaaaattcaaaagaatcagccttgcctgctgctacatctgcgccgaatatatcaaacagaatgtgcaaaaatatataataagtaagaagccttggaatactccgaggcttctttttttacccctataccgtctctgtatttcttacatcataatttataaactcattttaatttcaggttatggaaaagcaaaaaggattagctattattacaggagcaagtcaaggtattggtgctgtcattgcagcaggtttggcaactgatggttatcgggtggtattgatagcccgaagcaaacagaacttagagaaagtacatgatgaaatcatgcgatcgaacaaacatgtacaagaacctattgtactaccattggacattacagattgtacaaaggcagatactgaaatcaaagacatccatcaaaaatatggtgctgtcgatatcttggtgaatgcagctgccatgtttatggacggctctcttagcgaacctgttgataatttcaggaagataatggaaataaatgtcattgctcaatatggaatactgaaaacggtgacggagataatgaaagtacagaaaaacggatatatatttaatgtcgcatctcgcgccgctaaatatggtttcgccgatggaggtatttatggttctaccaaattcgcactcctcgggctggctgaatctctataccgtgagttagcaccattaggcatacgtgtcactactctttgccctggctgggtgaatactgatatggcgaaaaaagcaggaacaccttttaaagatgaagaaatgatacaacctgatgatttattaaatacaatccgatgtttactgaatctatcagaaaatgtatgtatcaaggatattgtttttgaaatgaaaaagagcattatttaaatcttcggaaataaataaatgcttgaactacttttataataagaaggaagctccaacatgattgatgaactatgaattttgtcagagcttcctccactttatattatttacggttcaaataaccttctcgtacaacttgaaccaatccagcccataatgtcccagtcctaagtccacagtgtcaatatactcgaacccacatttttcgtacaacgaaatagccggaagattcttctcatatacatcgagtcggatagatttcatttctgattttaaagccaactccagtgaaaaatccatcaatgcatgtccaactcccatttgcaaaaaagatggatgtacaacaaaagtgcgtaccacaaaaatataactataatccgcatctattttccatactatattctcataagccttttccggctgatgatctaaaatgacagaacccgcaatcctcccgtcacatcgggcaacaaacagactattatcatccacaccggcagccgcattctcacgaaccggataaatcccctttatccatcccggataattgattgtagctgacaagtgatcgttcaattcatcatacagcctctctaattcatctatatcagccaaagaaccgggttcaattataaaattcatacatatattgtttgaggacaaagatataacttctgttctaataaatatcaaggggatgttttactttttttcaatcgccaacaaacaacagatactaacacattgttttattcataagtaaagcatacatcaaaacaaaaaaaacaaagttgctatgaggtggatatggtattgtacattgttagcgtatatcgcattcctattagggctgatttacactattataattgattacgacgacaaaaatcctgtgaagacgatctgctggattctagttgttatattcttaccattactgggtatatctgcctattatattgtaggacgtaatgtaagcaaaaagcgttcaaaatttcagttttggagagaagaattcaacaggcaccaacaatccgtttctaccaacgtggaaacagagccaatacatcccgatcattataaagaactaaaatcactcatattgaatctggaacagtcaccagtattcggaggtaacaaagtaactgtctatccgggtggtaaaagtaagttttacagtcttttcgaagatatcgactgtgccgaatcgcatattcatatcttctattatgctattggcgacgaccatatcggcaacgaattaaaagagaagattatcaataaggtaaaacaaggcatcaaagtacgactgctttacgacggactgggatgcaataaaacgaacagaaaatatttcaagcaaatgatagaagcaggcgtgaaagtgaaaacgttcctcccgcttagttttccccgcttcctgcgaagtgtcaattaccgcaatcataaaaagatagtcatcatcgacggcagaatcgcctataccggtggcatcaatgtaaaagacgtatacatagacggacttccctggggaaaatggaatgacatacacttcaaggttgaaggttccggagcttcggggctgcaatctgtgtttctggcagactggtattatgcttccggacaatatctgtcttcaccggagtattatcccaatgtcgaagtcttcggagaagtaccaattcaagtagtcaacgcggaaccgttgggaatgcattccaatgtaatggaagccatgtttacagctataacgcgggcgaaaaagaatgtatatatcgagactccctacttcataccgacggaatgtctgcttcaggcaatacagaccgcatcaatgagcggaatagacgttcgccttgtcatgcctaaaagatcagacaatgattttgtgcaatatgcctctaactcatatgtggagaaactattaagaaataaagtcagagtctatcaatatgtcaatggatttacacattcaaagttgatgattgtcgatgatgaactggtggtagtcggttcagccaatatggatataagaagccttgaacttcttttcgagaccaatctgttcatttacgacaagaaagttgctcagaccgtcagagacatttatcacaccgatatgaataatagtaaagaactaaatctacgcgactggctccaacgcaaccgttcggttaaatttcgcgaagcgtgtttccggttgttttctccggtatattagctgtctgagcaccaccccaaaactatcaaaaaccaccgttaaattgtcagaagcctcctatctaacaatttaacggtggttttatgtcaatttccccactatcgggctcatagaaatcacatatacttgcactgtcaaaacaaacaaatttatcaaacttaaaaacaatcaacatgaagaatttcacctttagaaaagaattagtagaagcacaggatgagttactccgtttcgcttacaaacttacaatggatattgatgaagcaaacgacttattgcaggaaacgtctttaaaagcattgtacaatgaagacaagtatatatctgatacgaattttagaggatggatgtacaccattatgcgcaatgtttttatcaataactaccgcaaagtgattcgcaatcagacttttgtcgatcatacagacaacctctaccatctgaatttaccacaagatgcaggttttgaaagtacagaaaatgcctatgacctcaaagaaatgcaccgtgtagtcaatgctcttgccaaagaatacaaaattccgttcgctatgcaccttgcaggattcaagtaccgtgaaattgcagataagctacacttgccactaggtactgtaaagagccgtatcttcttcatccgcaaaaaattgcaggaagagttgaaagactttcgctaatttttttttcaaatgcgacagagagtaatctgagacccgggtgtcagcatgtatgagacccgggtgtcagacataccaacacccgggtgtcatgcaactcacagtaatagtggattaaaatttcattagaatatcgactcttccatgcatgatagatagcaaaactttggatatcttctcaacaggccagtcccaccatttcaattcctgcaattgcgcaatcgtatcttcgtcaaaacgcatccggattttcttcgcaggggtcccgcctactatcgtataaggaggtacatctttggtgactactgccctcgacgcaataatcgctccgtcgccgatatgtacgcccgccatgacaacagcctcataaccaatccatacatcgtttccaatcactatatcccctttattatcccatgccgaagtgatatttcccttatccaactgccactcctcaaaaaatataggaaacggataattcgacaaagaattcaacgtatgattcgcgctgttgaaaagaaacttagctccacaggctatcgaacagaatttccctatgatcagccggtctccattgacaggataatgatataaaacattgttcttctcaaactgaacaggatcatttacaaaatcattgtatatggtgtagtcaccaacctttatatgaggattattgataacagcattcagatagacagtctgaaggtcattggtacgcggataaatatttgtattcattgtaattgcttctttataagatttcttaaataaaataataaaatatcgggtgacctgtttagccacataagactcgaacaacagatttcaccattgtccatcatccatatagagcgaagctatttacaacgttgccatttcattgcgttaaaaaaataaggttcatatcacataacaaatgtacaggataattttgaaaatcagatgcaaggatctaaaaattatcccgtatatttgctgtataccatttatatcgtcactataaacctttagcatcatggcaacttatactcatttcggcaaacaaccggatgtactgaaacatctgatactttgcgaagttcttcggaacgagcatccacaagtctatgtagaaacaaattctgcttgtgccatctacccgatgcagcagacttcggaacagcaatatggcatttactatttcttagaaaaagcggtagaggaagacaatcaagttctaaaagactccatttactataagatagaaaatgcagaaatgcagagagggtactatttaggttctccggctttagcaatggaggtattaggaagacaggcacaaagatttctattcttcgatatagaaaagagtgctttggataatgtggaacgctatgcgaagcaagcggaactacagacatccgtccgcctatataataccgattctctcgaaggagtcatgaagttactgccatcactccccaaagattctttcattcatatcgatccttatgagatagataagaaaggaacatcgggactaacctatctggatatattaatagaggctacccagttaggaatgaagtgtttactatggtacggctttatgactcaacatgacaaaagccatctgaactcatacatcacgacccgactagaagaggcaaggattaaagactatatttgtgcagaactgataatgagctctatcagacaagacaccgtattatataatcccggtatcataggcagtggcatcctgggcaccaatttatcacagaaatcaaatacagccattcttgattacagtgatatactggtccgcctctaccaatacgcaaaatacaaggaccatgacggcagcttatacagagacattatcggcaatccaccggaaacctgagtcgaaaacaaggagtagcaaaaataggaaatacatcaatcttcccactaaatatgtattccatatcggtgcttcacttccgccatcacaaacgtactttccagcgaacccaggctatcgatggttcccaatacattcagaataaactcctgataatatttcatattaggagcatggatcttcagcaagtaatcgtaactgcccgatatattataacattcggtcacttcgggaatatcctgtatgattcgggtaaactcagccgcaatgtccctgttcagccgccttagcttgacactgcaaaagaccacaaaaccctgattcagcttttcggcatccagcacagcgatatacttctttatatatcccccactctccaaacgtttaaggcgctcgaaaacaggagtcgatgaaagactgacccgcgcagccaactctttggtcgtcaaccgcgcattctcttgcaaagtacggagtatctgcaaatccactttatccaatttctcaaaagtatccataagaaaaatattcttctaacaggtgatttttaagaataaagcagttgctttattctgtataacgatacaaaaatagcattattttctatatttctactatatattgttcgatatatctacatcccataactttgcaagaaaataaagagagaatatcaaacttaaaaagcatacgattatggaaagaaagaatttacactttgagacattacaggttcatgtaggacaggaacaagcagatccggcaacagacgcacgcgcagtacctatttatcagaccacttcttatgtattccacaattccgctcatgcagccgcacgtttcggcttgcaggatccgggcaatatctacggccgcctgaccaactccacccaaggagtttttgaagaacgtgtagccgtcctcgaaggaggcgtagcaggtctggcagttgcctccggtgccgcggctattacttatgctttcgaaaacattactcgtgcaggcgaccacatcgtagctgctaaaacaatttacggaggaagctataacttactggcacatactttgcccaattatggcgttaccaccactttcgttgatccgagcgacctttcctactttgagaaagcgattcaggagaacaccaaagccgtatttatcgaaacactcggaaacccgaattccaatattatagacatagaagcggtatccgaaattgctcaccgtcacaaaattccattaattatagacaatacattcggcactccctacttaatccgccccatcgaacacggagcagacattgtagtgcactccgcaaccaaattcattggtggtcatggcagttccttgggaggagtaatcgttgactccggtaaattcgactgggtagcttcgggtaaattcccacagttgacagagcccgatccgagttaccacggagtacgctttgtagacgctgccggtccggctgcttacgtcacccgcattcgtgccactttgctacgggatacgggagcaacgatcagtccgttcaatgccttcatcctgctgcaagggctggaaacactttctttgcgtgtagaacgtcatgtagaaaacgcgctaaaagtggtgaacttcctgaataatcatccgaaggtgaagaaagtcaatcatccgtcactctccgatcatccggatcatgcactctatcaacgctatttcccgaatggtgcaggctccatctttacgtttgaagtaaaaggaggacaggaagaagcacaccgcttcatcgacagtctggagattttctcgttgctggccaatgtagctgacgtgaaatcactagtcatccatccggcaagtaccacacactcacaacttaatgcgcaggaacttgcagaacaggagatttatccgggcactgtacgtctatccatcggaacggaacatatcaatgacctgatagccgatctggaacaggcactcgccaaaatctgacattagattctaacctatttgtctgttaaaatgtgattgacaacaagacgcaatgaagattcggggattgaactttccatcactatgatacgttataacaatataacattaaaacattgcagttatggagaaatatttaatacacagcaacgaactgcatctgatagacgcagggaaaatccaccaggcagtagagaaaatggtggagtcactcgatcttgccgcaggatcaaccagtaattttgatctctatcaggtagtagaaagctactttaaggaccttgaaaaaagaaggaaaatcaaccatgtactggggatcaaagaagaccgatatgaatttgcagaagacttcggcatcaaataaaaaagaaattttccaatcacaccagacaatttgttcatataaaacgagagagtctcaccgaagtgaaactctctcgttttagtatatatcttatagtgatcagtttccctgatgcacggtaagttgcgggaacgggaagttgatgcctttttcattaaaggtttcataaatagtcttgtttatatcaaaataaactccccagtaatctgccgtattcacccacacacgggctaccacattcacactgctggcatccagcgcatgaagggcaataaacggggcgggatcagtcagaatacgattgtcggccgtcagtatatcacggacaatctgctgtaccttattataatcttctccataatccacgccaacaatccattctacacggcgcgttgtctgtgtattatagtttgtcaccactccgctgctcattgcaccgttcggtatataaatcactttattatctccggtagtcagaatggtgtgaaatatctgtatttccttgaccgttccggaaactccctgactttcaatccaatctcctaccttataaggcttgaaaagcaatacgatcagtccgccggcaaagttctgcaagttaccggacaacgccataccgacagccacaccggcagaagccaacagggctgcaaaagaagttgtttcgactcccagagcaccgactacggagataatcaacagaatggtcagcagaatatttaccagactcttcacaaaagtcttgatgcttatatccacctttctcctgtccatcagacgtccgacaaatcggttgagcatcgagatgaggaagcgtccgacaatgaagacaagggttgcaatcaggatgcgttctccggcacggataccgaaatctaccaattgctgggtgatcagagaaagcttatccaatccgtccgcattggctatcgcttcttccattaatttatctgcgacgatttgtgtagaatccgcaagctgtgttgctgtcgcttgaaataatagtagcataatttgataattatattaaaatgaataaatagctgacttgtcatatttcaacaaactacaaagttatattgtttttagcaaatctaaaagttttttttgctttcctcccgcaaaagcagtaattttgccaacgattcactaagtaggggtgccttaacatgacgggctgagaacatacccatagaatctgaaccgggtaatgccggcgtagagaactaattaataagcaagatgaaaaaaatgatgatgatggccgtcgccttattgggcgcaggcttccctgtccatgcacaaacgagtgcaaaggatagtctgaaagtaatcaacctgcaagaagtgcaggtagtatccacacgtgctacagcaaaaactcccgtagcatttaccaatataggcaaagccgaacttaaaaaagtgaatttcgggcaggatattccctacctgctgagcatgactccttccacgctgaccacatcggatgcgggatcgggcatcggctatacgactcttcgtgtacgaggcactgacggcacgcgtatcaatatcactgtaaacggcatcccgatgaacgatgccgaaagccacaatctgttctgggtaaatatgcccgacttctcttcttccgtaaaggatatgcaagtgcaacgtggcgcaggaacatcgaccaacggcgccggtgccttcggagccagtgtcaatatgcagaccgaaggcgcgtccatgaaaccgtatgccgagttcaacggttcctatggttctttcaacacccacaaggaaactgtaaaagtgggaaccggactgctgaacaatcactggacattcgatgcccgactttccaacatcggtacggacggatatattgaccgtgcctccgtcaatctcaactcttactatctgcaagggggatatttcgccgaaaatacgtctgtcaaactgatcgcattcgcaggaaaagaaaagacgtatcatgcctggggatatgctactaaagcagaaatggaagaacacggaagacagtataacccttgcggcgaatataccggagacgataatgaaaaacattattatgccgaccagacggataactatctgcaaaagaattatcaactccttttcaaccatactttctccaccgcatggaatctgaacgtagctctgcactacaccaaaggtgacggctactatgaggaatataaagaagacagatctttcgtagaatacggtctgaaaccttttacaacagacggaaaagaaatttcggaaagcgatctggtccgccagaagaaaatggataataagtttggcggaggtgttttctccctcaattataccaaccaccgactaacggcatctttgggcggaggcatcaatcaatatcggggcaataacttcgggaaagtgacttgggtaaagaactacatcggcgcactatctcccgcccatgaatactaccgcaaccaatcgaagaaaaccgacggtaacatctatctgaaagcaagctacgaccttaccggaggactaagtgcctatgccgacctgcaataccggcacatcgactacaccatcgacggagcaaatgacaaatacgactggaataaaagtgcgttgcgtccgctggccgtagacaagaaattcgactttttcaacccgaaagtcggactgaactggaatatcaactccaatcaccgtgtctacgcttctttctccgtagctcaaaaagagccgacaagaaataattatacggatggtgatcccgacagttatccgaaagcagaaaagctgctcgattacgaagccggatacacattcgccaatcattggctgacagcaggcgccaacttctactacatggattataccgaccagcttgtcctcaccggagctttgaacgatatcggtgaagcactgacagaaaacgttccggacagttaccggatgggaatcgaactgatgctaggtatcaagccctgtaaatggttccaatgggatatcaatgcgacatggagcaaaaaccgtatcaagaatttcgtagaaaacattcccatttacgatggctggaacttactggacgtcgtaagcgtttctcataagagtactcgcatcgccttttcaccggatttcctgctgaacaaccgttttgcttttacctatcaaggattcgaagcagcccttcaatcccaatttgtcggcaaacaatatatgacaaatgcggaagtggaagcattgactctggataagtatttcgtgaccaacctaaatctggcctatacattcaaaccccgaaaagtggtgaaagaagtaactttgggtgtgaccgtctacaacctcttcaacgaagaatacgagaacaacggttgggcatccagttcttacgacaaggatgtgaatcacagaatagattctgccggatacgctgcgcaagcgggtacaaacgttatgggtcatgtctctttccgcttttaacaataaccattcaaacagacaagccagaagccgccaacatggaacgcggcttcttatttcctcattttctcttccatatatttggaaggaagcaccccaaactgtgcaacgaactgcttacggaaggaaatcatcgaatcataccctaccatttccgccacttctgtcagactgctatatcgcccgctcatgataatagaggcagctttactcatccgtactccatgaatcacctctataatcgacaaaccagttttctgcttaaccttgcgataaagggtcggctggctcatattcaatttgtccgtcagcacttttattgtaaaattccggtttgataaattttcttctataatctgaagcattttaggcataaaaacatcctgaacatcttctgaagattccagtacctcttcatccagcataagagttttcgcataaagttttcttaacagatcacgttgttctatcaacgctttcaccttctctttcaataactccggattaaaaggtttcattatatagtcatctacccctatttgtaaacttttcaaccggtcagcatcctctgctttagctgttaaaaagataaccggtatatgaaaagtccgcttattttcacgaatctcccgactacattcaaacccatctttaacaggcatcattatatcagatatgattaatttaggtatatatttatcagccatcgccaccccttcttctccatttccagcctcaataacattataatcttctttaaatagactgcataaatattctctcatctcatcgtggtcctctataatcaataaaaattccttattatttttcactctgttaacgggctcttccatagtctcattcttttcttctactacttcttccatcggacgttcttctgccggacacccttccaacaaatcccccttcatcggatcaggtaccatttcatattcccccggcgcaaaatgagaaagccccatcggaatgtgcagaacgaatcggctgccttctccaacacgactggtcaacgttacaaatccatgatgcaaccccatcgtatgctttacaatatgtaatccaagacctattgacgtggaatattgcgggatacgtttccctgttacaaacgaatcaaacacgtgctgttgcaaatcatcaggtatcccaactccattatcagacactgttacaaggcaataaggtcttccgtcaatttccgcctctgacacagccagttcaatacgtccattctgagaagtgtatttaaaggcatttgataacaaattttgaacagctgattctattttcgccacatccacccataaatacaaaggcactgtatctacctggaccaaaaattcccgcttcttgaccatagccatttgcagaaaaggattagccacccggctaacaatctcctttatatccgattctgacaaatgaagttttatcatgcctccctctatcttctgtacatatagcagacgatcaaccagtgtctgtagagaaagacaattcttgtgcaatctgctaaatgaatcaaaccaattatccgatggggtaatggacttcattatatcatgtataggagcaagtatcaaagtaagaggagttcttaactcatgagcagcattcataaaaaagttctcacgttcttcccgtatatgccgttctgcgtttctctccaaatttgcaatcgtcagttcatgtttcaattgaatcatttttttgaaacgacgttgccgccgcaacaaactatagaaaatataaccaaccaaaaataaaaccgagaaaatcaaaagcaaacgaaaccaaacggtctggctccaatgtggaaggattgttatcggcaatgcagtaacgtctccttccgtattattagggaacaatgttttgacttcaaaaatataataaccggcagacaagttggtaaacgagaccttacccgcttcagaaacaatccaatctttttgatatggatataaccgatagctatatttttgcagatccttcgaaaaagccagattattgaaaaggagagagaaatcacggtttgcattgaccagttccaaatggtcaattgatgcaatatttgagtccaaaacaacttgcccttttatcttctcacctatattgatttgcttattatcgacttccaatccagttaaaagagttttgctggcaatggtggcagatgtcagtatttccggttcaaaataagttaagctcttgttatttccccaaaataaagtattcttaaacaacatcacagatttattgctactagaaatataatagttgtagaagacatgttgttgtcggctatatcttgagataccggatatactccccaaccaaatacgcttcttctcatcttccactatacaatctatacaatcattacaaagtccatcttttactgtataaaaagacgttatcctatcttcgcccacaggaatgattccaaatccatttttataacccacatatacagttccgtcagtaccagtcagtaaagcactaactacacgagctcctatattttctttttcttcatatccatgaaccatctttaatggacgaacattgacctgtgataatcgtacaataccttttgctgtccctatccagatattccgctgtttatcttcacaaatagcagtgacccatggctctgcatcttctttcaaggcttcacgcaatgagaataattcaaaatgacctgtctgatgatcaaataagtacaatccggcagaagtgcatacccaaaaccgataacgggagtcaatcattaaggccactatataggagtttacctttttccctaaatgattgagcggatatatatggaaagaattggaactccagtcataacaaatcaagtttccggaagcatttccaaaccataaattagaacatgaatctttgattgcacaaaacaccgggacttccttttgattgcccacaggagaaaagttcagcggtcgcgatttagcataaggctggtcactacgcataattccttcatggtaagtgcccaaccaaattcgaccatctttgtcagctacctgagcagagatttcattatgttttttgctgtgatattgcatataagaatgctgtctaaaatcaaaatagacaatccctcctcctctagttccgatccatagtattccctctttatcataataaacagaaatcattcttgtctctacattccggtactgcaaaaatgaggtattcgtataaggcgttgccgacaacttagaaggatcattttcttcaggagctaacagagtatatccattccaggttactgcaatgtaagaatcattatccaatgcaaccaccccatacgcatctgaatgtgataaagaagacaacctggcatcctcattatactgataataatcagattttcccgtaggaatatgcagacgagttactccacccactatagaagaaacccaaatatattccccttcactcatgatagtagtagcattagcactaggattaatagagtatttgaacttccggaccactttacctgcaatcttatcaaagaacaacaaatttcccttatcggtaaccaaatacaagaaatgcccgtcttgtgaagcacataaattcgaaaaagattccccctcatctaaaaaaaacggatagcctgcttcgacggtcatctctatttgtaagtcacctttcactaatttataatgtcgtttcaagcattgcaattgtccgccttttactatccaaaaaagtgaatcccccgttatttccatagcacttacagaaatggccttttttccatcctgaaaagacggaagaacaaatttctctttccgtcgatcaaaacaatataaatactcattagctattacccacaatttatcatcagaagtctcttttatatcggaaacatacatcctcgcattgtctacactaaaattgcgaatctgcttcccgtcatatcgactcagcccattactggatccaaaccacataaaacgatcttgatcttgatagatacaagtaatgatgttatctaccaagccattactcatattcaactgatgaagttcattataaggcagaacagcatagagagaagtagtaataactaaagaatttataatagcaatcaaaacaaggacggtatatcgaacggttcgcttcattatatattcatattagtttaagtgtcacaaaaataatcaatattataatagaaaggcgaagcaaatgataaaaaaagcaattttgaatgaaaagatatacatggatgaataaaagcatatgctcctgattccttgaaatcccctaagtttgtatcctgaaaaccgaacggaaagtgtgcttcacaattatatatagccatttacacctttgaatctgtaatatttaaaacaattaatcacatgagagaaaaagccaaaagcccttaagtcaaattgaaatcaattagaatctattaaaccttatttaaatagaaagcctaaaaagaccttttttcaaactaataaaatcttatagaaaaacatgcgtaaatcatttaatctaatctggatggttttcggcttcctgctactaatagtaggttgtaatgaagacaagaaaagcacagctttcgatcctaatcaaccagtcaagtttacagagtttatgcccgattccggtggcatacgaaccaaattcattgttaaaggttccaatttcggagaagacaaaagccaagtgaaagtttacttcaaggatgaagtaggtaatgaacgggaggcattggttttaggtgtcaagcctgatgttatttatgcccaagtgcccaagcaagccggaggggaaagccatgtacgggtggagattgccggaaaagaagctgaactcagcaatgctgaaaaaacattcaaatatattgtaacttcttccgtatctacagtagtaggaaaagccaaagaaggtggcaataaagacggaactctcggcgagaccacattcaatactccaaggtatgtagctgtagacaatgatgacaatgtattcatattcgactctgatggaagaacgcgtttatcatccatcgaacaaaataaaacgatcactttactggatggcatggtaatcgaccaacctttatttatcgataaagaaaagaaacaactatttggtccatgcgataatgccaacttcggttgtttcttattcgatgctaatgtgagctgggtggctgataaaatgggacagcttttagccaacggaggatggatgcatagtgttgttctcgaccctgtagattctacttttgtgatataccgccaaaacacaggacaattgtggacacaaccttttgataagaataaaagaaccttaaatcccaacaaagcaaaacgaatcggtacactctataatgtaggctccaatggtttatgtgcttacaatccggttgataagtatgtttattgtgtgttgcatagtaaaagtgcagtttatcgctttaagctcacacgcgatacggacggttggccagctctagacggagacattgaagaatatattcccggtgcaggcgcaggcttccgggacggagatgtacaagaagcacaattcaatgagccgcgtggaattgctattgataaagaaggcaatttatatatagcggatgttaataaccatcggattcgtaaagttgacaccaagttaaatatcgtgaccacgatagcaggtagcgggaaaggatacaaagacggggatcctttggaagcccaattcgatcagccttggggtgtctatttggacaaaaatgaatttctttacattgcagatcaaaacaaccactgcatcagaaaacttgctattgaataattaataaggaatagaaatgaaaacactatattttaaattaaccctgtgtttctttctgctattggcaggaaatgcaacacaagggatatgggcccaacaagaaccaattcaaattgccggaatcgtgttagatgaacatggtgatccgctcccgggtgcaaacatatctgttaaagggaaagaaaaaaccggaactataacagatatggatggtaacttcagtatgaaatcattagctccaaaaacaacgctgattgtttcatttatgggatataagagcaaagaaatagtggttgctcaaaccgataagaagatgcgtatatctctggagcccgactcagaatcattggacgaagtagttgttgtaggtatgggaacacaacgtaaagtcagcgtggtaggtgctgtcaccagtgtcaatccggctgccatcagtgctccgtcaacttccgtagccaatatgctgggaggtgtggttcccggtattatagccgttgaccgaagcggcgaaccggggcaggatgtttctgagttctggattcgcggtatcagcacatttggtgccaaccagtctgcgctggttttgattgacggtattgaaggaaacctcaacgacctcgacccgtcggatattgagagcttctctatcttgaaagatgcttcggcaacagccgtttatggtgtacgtggtgcaaatggcgttgttttggtaacgacccgttccggtcaggaaggtcgcaccaaggtaacctggaagagcagtatgactctctcttattccccccgtatgcccaaatatctggaagcatacgattatgccagcttggcaaacgaagcccgagtggtaagcaatatggaccctctttatagcccgacagaactggagattattaaagcaggactggacaatgacttatatccaaacgttaactggcaaaaagagatattgaaagatgtaactatcaatcatcagcactatttaaatgtatccggtggtggaaaagttgccagatattttgtcagtgtaggaggtacattcaaagatgctatcttcaagcaagacaaagttaacaaatacaacacgaatgtcaaatgggctaaatataatttccgcgcaaaggtagacatgaacctaacttcatcgacgatcatgggattggctatggacggagctattgtagaagacagagcaccgggattcggaactaacaatgacgcactctgggccgcacaagcctatctgactcccctgacggtgcctttacgttattccaatggaatgcttcctgcttatgggaaaaacggagaacaaatctcaccatatatcttgttgaaccataccggatttaaaaagggaaaccggaccactatgaacatcaatttcaccttacgtcaagacttcggaaaatggatcaagggtttgactgccagaggaatgttctcgtataacaataacaatatacacaacgtagtccgctccaaaatgccggacctatacaaggcctttggccgttacaatgacggttcattaatgacacaacgtacggtatcagccagtaatattcaattcgccaagagtgctgccagtgaccggagatattacttcgaatcgcaacttgcctatgaaagacttttcaatcaggaacatcgtgtaaccggtttgatacattactatatgcaaagcaccgaaaccaccgaagcaaatgatgaaatttcatctattcccaaacgttatcaagcgttatctgccagagccacttactcttataaagatgcttatctgatagaaggaaacgtaggatacaccggttccgaaaactttgaaccgggcaaacaattcggtttgttccctgcaatagccttaggatggatcccgacccaatacgaatttatgcagaatcatgcaggatggctcaactttttgaagatcagagcttcttatggtgaagttggtaacgatcagatcggtggtggacgtcggttcccatatctgacgttgattaactttggaggtggtagtcgttggggttccaatggattgacagaaaaacaaatcggagccaacaacttacactgggaggtagccaagaaatataacctgggtatcgacttccaatttctcaatgataaaataggtggaacggtagatatcttcagagacactcgtgataatatcttccaggaaagaaaaatgatgccttcggaagtaggcgtcgtgaccaacccatataccaacgtaggacgtatgcgcagtagtggtatagatggtaacatttacctgaaccagaaaataaacgaagacaactctttcacggtgcgtgccaacatgacatatgctgtcagcaaagttgtacattgggaccaggatgcggtgcgctacccttaccaatcgtatagcgatgtaaattatggtgttatgcgcggtttggttgcattaggcttatttcaaaatcaggatgaaatcaaccgaagcccgaaacagacatacggcgaagtacgccccggagatatccgctataaagacgtgaacgctgacggaaaaattgacgatgacgatattgttcctattgcacactccaatgtaccgcaaattcaatacggttttgcactggaatacagatataaaagatggactatcagtgctttattcactggagcagccaaagttaacttcttatacggcggttccggattctatcccttctcaggcggagaagtcggcaacattctatccatcgtaaacgacccgaagaatcgttggacaccggcatggtattcaggggatccttctacagaaaacccgaatgcacgtttcccgcgcctgacttacggagagaataaaaacaataaccgtgcttctactttctggctggcagatggttcttacctgcgttggaaatcattggatatttcctatcgtatcggaacgaataaagtactaaggacagtgggcatcagtgatatgaatctgcaatttgtcggacagaatctggcagtatgggattcagtgaaactatgggatccgggacaggcatctaaaaacggcgccgtatatccgctacagcgtactttctctttacagttaacagctacgttctaattgaaaactattatgaaaaagatattaaagaaaagccttcatattctatgcacgacactggggatcatcccgttcatgctgacttcatgcaactatctggcagttgatgaatactttaacgacctgactccactcgactccatctttgccagacaagattatctggagcgttatgtgtggggaactgcggcattaatgcccgctcaaggcaacttgttttccggttcctacggtccttacgagactgcggtagatgaagtccttctgtcatggcagaaagctgagtacgccggtacctacttgtatgcagacaaaattacacagaacgattcttactacaacatgtggggacaatactacaaaggtatccgtaagtgtaacactatcttcacccgcatcgatgaatgcaaagacctgaaaggattggacagacgtgaaattatgggtttgactcatttcatgagagcttccttctatttctatctgttggagctttacggaccggcagtcatccttcccgaagagccgctgtcggtagatgaaaacattgaaaacttgtcattcgaacgtaacacgtacgatgaatgtgtggaatatatctgcaaagacctcgaagaagcttacagtctactggacccgacgcgcccgagcactcagttcgaacgtcctaccaaatatgcggcagccgccctcatgtcacgtgtccggctttaccaagcttccaagtggtacaacggcaatcaatattatgccgactggaccacttccgacggacgaaacatgatagcccagcaatatgacccggtgaaatgggcgaaatcagctgctgcctccaagagaattatcgatagcggtatttactcattatacactgtacccagcgatgaaaacacgtatgcatcctctcaggcgtcacaagcggaatttccgttaggagtaggaggaatcgatccttaccattcgtatatagacatgttcaatggagaagcactggctgtgaaaaaccctgaacttatttatgctactcccttgaacaacaacatcatttcaatcgccttcccgttgaaactgggaggatggaacggcttaggaatcactcagaaactcatagatgcctactacatgaaagatggagaagattatgtgcaacaacctgattattatgaagaagcgggtactgtacctaccatcgccacaggatatgagctgagaccaaccgttgccaaaatgtatctggaccgcgaaccgcgtttctacgcatctatcggattctgtgaatgtttctggcccgcaacttcggtaacaggaaccgaagctcccaacgtgactaactttacagcaggatattacgtgaatggcaactgtgcaaaacaggctgccaatccagaagactataacttaacgggatatactctaaagaaatatatccatccggaggataactgtaccagtcatacaggtgctaaaataaaaccgaaaacattccctgtattcagatatgcggaaatactgttgaactatgtagaagcattgaatgaactgaaaggagaaccggaatatacggaagcggcagataacaccacttatcatgttttgtataatccggaggaaatcatgtactacttcaacatgattcgttaccgtgccggattgccgggcatcacccttgccgatgccagcgatcaagtgaagatgcgtcagttaatcatccgcgaacgcatgatcgaatttgcgtgcgaaggaagaagatatcatgacctgcgtcgttggggactagcagaaacagaagaaaacaaaccggtacaaggtatggacgttaccaagaagacaaccgaaagagaccaattctatactgttgtcaatgtagttcataagtatgcattacgcagctttgacaggaagatgtacttctatcctattccgagagccgtattggataaaaatgccaaactgaaacaaaatccaggatgggacggattcggagattggtaactttcccctttccatcatataactgattattaatcatataaaattgaacatataatgagatcaatatacaaaatagtggtctgttctttgttaacgctctccatcacttcttgtgaaaaagacctgcttgaaaaagaacaatatcagaaagaaatctacctgatcggtgcttacaaccgagtatggaccacagaagtaagctacagtaacgaagaagtgaaaacttatttcacggtcagcagttccggtacattagcattagaccgagatgtgaacgtaaaaatgaagatcaacgaagagttggtagatatttacaataaaaaatactggaccgttctgaatgaggacaaatattataaatcattggatactgatttatattccattccttctttggagaatacggtaatcaagcacgctgaaggtatttccgccgaagttcctgtgttgataaagacagcaagtctgaagattgaccagtcatacgtcatccccgtcgaaatagaaagtacaacaggatatccgataagtgaatccggatataaaatgttgattctattaaaattaaagaatgactattcgggcagttaccagatgagtgggcataccaccttagaaggagaaactccgaagacgattcagaagcctaaaacgattaagcctaccggagtcaacactgtcagactattctatgccatgaacaacgagagcgacgagaaagctgatatccaaacgggtacaatagaactgaccatcacggatcagatagtggaaggcactaatgatgtaaagaaagttttgatcaaagcatgggatgctgaaaacggaccggtaattatcgactcaggagaaagtacctacaacacaaccgccaaaaagttcagcctcaaatatacgatcggtaacacgctatatgaagagcaactgaccaaagaaaaagaagttttataatacacgacaaatgaggagaagaggagatttcacggcattgcaaaaatgccgctgaaatctcctcttcgttttttcaacggaggacttgtttttacatgattccttgttttccttctgctaaattcgtaattttaccgccgattcacgcaataggggtgccctaacatgacaggctgagaacatacccatagaatctgatccgggtaatgccggcgtagagaacgaataaataagcaaatatggaaatgaattatctggagatattcggtacgtttatcggtattatctacctgtggctggagtatcgcgccagtatctatctgtggctggcgggcatcatcatgccggccatttatatctttgtttattacgacgcggggttgtatgccgacttcggcatcaacatctactatctgatagctgccatctacggatggttcttctggatgtggggacacggggaaaagaaaagtctccccattatacataccccgtggaaatgctatctgccactattccttgtgtttatcgtgtctttcgtcggcatcgcccggatacttatcgaatacacagacagtaacgttccgtggctggacagtttcacaacggcgttgagcattgtcggaatgtggatgctggcacgcaaatacatcgagcaatggtttgcctggattcttgtcgacatcgtctgttgcggactttatatctataaagatctctatttcacctccgcattgtacggactttactccattatagctatctttggctacttcaaatggaaaaaaataatgaacatgcaatgataaacgaacactatataccccaagccgtcatacttgccaacggtgaatatcctgcgcacgaacttcccctgcgtcttttggcagaagcccaattcgtcgtttgttgcgacggggccgccaatgaatatatttcccgcggacatactcccgacgtgattataggcgatggagactcgctcctgccggaatataaaaagcgtttttcctctattatccttcaaatttcggatcaggagacgaatgatcagaccaaagctgtccattatctgcaaagtaaagggatacggaaaatcgccatcgtaggtgctaccggcaaacgggaagatcatacgttaggaaacatcagcctgctcatggagtatatgagaagtggtatggaagtacggacagtcactgattacgggacatttattcctgtgagtgatacgcaaagttttgcctcacatcccggtcagcaggtctctatcatcaattttggagctgaaggattaaaaggagaaggattgttttatccgctaagcgacttcagcaactggtggcagggaacacttaatgaagcaacagcagatgagtttaccattcattgtacaggagaatatttagtattccttgcttattaaatccctgttccggaaaaatattctttcatctgccttactactgatagtttcctactgtggaactattatttttttgcctaatgaaactttagtttcacggccttggaactagagtttccagcgcttgaaactttagtttctgcagtttggaactaaagtttcttcagcttgaaactattggtttcaaggctttggaactatagtttcattgcatggaaactaactaagctaaggtattcctgacttatcattccaagaggtcagtatattattgtagcaggatataataacacagcgtgacggcattgtgacagcatattttgctatcacaatgccgtcacgctgtgctgtcacctctttattagtttataatcagtgcgttatctatcatttggtgacagatgacagcaattttggatatttcaattctctagtagagcggctcaaagcaatttattccttttcgtattgttatgagctaaatgatagtcggttctatcttccattctcctccttcgggaaggaggagaatggagttactattgtgtactactgtttagttcattcctaaacagatttgaattatttccgcacgtcatttattttttccggcaaatacaatccttcaagtgatcgttgataaatcccgaagcctgtaagtgagcataacaaatcgttgttccaaagaatttgaatccgcgctttttcatgtccttactcattgcatcggattcgggagaagatgccggaatctcgctcaatgaacaaaaggtattgacaataggctttctgtcgggaaagaatgagagcgtgtagtcgtaaaaactaccgaactccttttgtatagcaaggaattgtctggcgttggtaatggtcgatttgattttcagacggtttttcacaatgccttcaaagtgcatcaaccgttcaacatcttcatcggtcatctgtgccacccgttcggcatcaaaatcgcaaaaggctttgcgataaccctcccgttttctgaggatggttatccagctcagccccgcctgggcactttccaatacaagaaactcaaacagcgtcttgtcgtcagtcaccaaatttccccactcctgatcatgatatttcacatacagttcgtcggttccacaccaaccacagcgtccgtttactatatcttgcataattatttcttttataccttgctttaaaacccaatcaaacagaaagcaaatacttcttgaagtctgcaaattctttcgtcatttgcaagctcttcttctcccctttcataaattcctgcaacttggcaggtatttctaccgcttcgccaatgatactttctaccgtttccaggaatttagcaggatgagcagtttcaaggaagactcccgtttcgccttgtttcagtccttcttgcaaagcgcgataaccgcaagctccatgaggatcgagcaggtaatgatgttccttccaggtttctttcacagtttcgcgaatctgctcgtcggtatatgtagttcccgaaatctcagcggaaatgtcagcatgagaaccgccatacaagtcaagcacacgagcaaagttgctcggatcacccacgtccatagcgttggcaatggttgcaacggatgggcggggattatatttacctgtttgcaggtattgatagaatatatcgttgcgattgttggcagcaataaaacgtttgacaggcaagcccatctttttgccgaacaatccggctgtgatgtttccgaagtttccgctaggaacacaaatcacggcattatcggcttttccggcacgcttcagctgtgcataagcatagaaataatagaatgcttgcggcaggaagcgggctacattgatagaattggcggaagtcagtgacagatgttcgttcagttccttatccatgaaagcagcttttaccagtgcctgacaatcatcaaacgttccgtccacttcgagagcggtgatattctgtcccaaagtagtgaactgcttctcctgtatttcgctgacttttcctttcgggtaaagtacatatacatgaataccttccacccccagaaaaccgttggcaacggcacttcccgtatcaccggaagtcgctaccagcacattcacatccttctgcccttctttcttgatgaagtagcccagcaaacgtgccataaaacggccgcctacatctttgaaagccagagtcggtccgtggaaaagttccagagaatagatgttgtccgccactttcaccaacggtacatcaaagctcaatgtgtcatacactatttgtttcagggtatcggcagggatgtcttcgccaaagaaagcatcggctacacgataagcaatctcctgaaaagacaaagtatctatcgtatcgtaaaattcttggggaagaggcttgatagtcattggcatgaaaagtcctctgtcggcggcaagcccttttactacagcttcctgcaaagaagccatcggcgcttgtttatttgtactatagtatttcattggatattcttttgattcataaattcttttataaactcatcttctttcagcacaccgtaactgccgtcgcatgccgatatctcgtcatacgtctgcacttcatccggttcgatgcccggataccagataaggaacggtataggatcggaagtatgggtgcgaagttcgcagggagtaggatggtcgggcaatacggcaatcgccacaggctcgtcccagtccttcactgcttcgtagatagggcctacagcacgtttgtcgaggttctctatcgtcaggagtttcagatcgatatccccttcgtgtcccgcctcatcactggcctcgatatgaagataaacgaaatcgtccgtcttcagtgcttccagagcggcagctactttattctcataatttgtattatacaatccggtagctccctctactgcaatacggcgtaagccggcataatatccgattccgttaatcaagtcgacagccgaaataactgctcctttctttacttgcggaaaggtttcggagaaagtaggcatctgcggacgatagccggggctccagggccagatgctgtttgcagggtccttgccttccgacatccgtttcagattcaacggatggttcttcagcagttcctgtgatttaagaataagatcattgataaggtccgccgtttcctgtgcttccggcactaaaggtttcaccatcaacgggcggaaaggtttcaacgggacatcgtgcggaggagtacaatccagctctttattcccccccttgataacaagcagatgacgatactggactcctgtatggaagcgtacgcggtcattccccagcttctcttgcagatactggatcagtacatccgcttcttccgtagatatatgtccggaagagtgattcttcagaatctctccttccacacaaatcagattacaacgcatcgccatttctcccggtttcaggtctacaccgatactggctgcttcgagcgggccgcgtccttcgtacactttcggaagattatatcccaacacggacatattggcaacctcactacccggatggaaaccttcggcaacagttatcaaacgtccattgcgtcccatgcgggctaatttatccatataaggcgtcttcgcatattgcaggagcgtcttgtcccccaatgacttcactggccagtcggccattccgtctcccagtatgataatatgcttcattttaataccccttatttaaacgtttgcgatactcatgatatcagcgaatactcccgcagccgttactccggcaccggcaccgtatccttgaatcatcatcggatattctttatagcgttccgtagtcagcaagatgatgttgttgctgccttccagtccgtagaacggatggttggcgcccacttcctgcaggccgacagaagcttttccgtcttccagtttggctacaaagcgccaatgtttatgttctttctccaatacctgacgacgggcttcgaagtctgcgtcgaggctcggcactcgtttccagaagtcgtccagcgaaccttcgaagaagtcgttcggaacaaagagattcttttctacgtcttcctgctcgatgtggtatccggcttcacgtgccagaatcaccagtttgcggatcacgtcttttccgctcaggtcgatacgcgggtccggttcggaatagcgttcttcctgtgccatcttgatcgtgcggctgaaaggaatgtcagcgctgatcttattaaagatatagttcaatgtacccgaaagtacagcttcaatcttcagtatcttgtcaccactgtgaatcaggtcgttaatggtattgataatcggcagtcccgcacctacgtttgtttcaaacaggtacttcacaccccgttgacgggcaatcgttttcagttcgcgatagttctcgtaagccgaagacgcagcgatcttattggctgccactacggaaacgttgtgttgcagaaggtctttgtaaagtgatgcaatatcggggcttgccgtacaatccacgaatacggagttgaagatattcattccgactatttcgtcacggatcgtctgcaagttactatccttgcctttctcctgcaactcctcacggaaattggcaaggtcaaatccctcacgactgaacatggctttcgcagcatcaatgatacctacgacgtgcaacttcaatccgttctccatcatcagcttctgttgctggcaacgaatctgttctaccagactaccgccaaccgtaccgataccgcagataaagagattcaatacctgatattcggacaggaagaaggagtcatggataacgttcagagatttacgcaatgacttggaatcgacaacaaaagaaatgttggtttccgaagctccctgcgcacaagcgataacattgataccattacgtcccagtgtaccgaagagcttccctgctatacccggtgtatgcttcatattctcgccaacgattgccaccgtagccagatttctctctgcaaggatcggagaaatctctcccatctcgatctctttcgcaaattcttcattcagcacttcacaagccagatcggcatcagcgttccgaacaccgatagaggtactgttctctgatgaagcctgcgaaacaaggaatacactgattccattctttgccaaagccttgaagatgcggtagtttacaccgatcacacctaccatacccagcccttgaacagtgatcagactcgtatcattgatagaggaaatacctttaatggccttactctgcggattggaagtctcttgcttgataactgttcccactccgtcaggattgaacgtgttctttattataataggaatattcttatgacataccggatagatcgtcggtggataaacaactttcgcaccgaagttacaaagttcggttgcttccacatagctcagttcggaaatagtataagctgttgagatcacgcgaggatcggcagtcataaagccgtctacatcggtccatatctccagactgccggcatcgagcgctgcggcaataatggcagccgtataatccgaaccaccacgaccgagattcgttacatctcccgacaccttatccgaagaaataaatccgggaaccaacgatactttcggaatggaatggaaagcctcttttactaactgattagtcagatcggcatcaatcgtatgtttattatgcttcttttcagtcttgataaaagtacgcgaatcaaaccattttgcctcatcgatcagttcggcaacgatgatggacgaaagacgttcgccatagctgacaatggtatccgatgttttcggggaaaggtctctgatcagatagataccctggaaaatgtctttcaactcattcagcaattcgccaatctgacgttgcaatgccacttgccctgctccggcaggaatcacttctttaatcatctccacatgacgatagacgatttcgcggaattctccttcgtaggccgaatctccggctgccgccatcttcgatgtattaatcaatttgtcagtgatgccccctaacgcggaaacaactacaattaccggctcactggccgactctacaattctctttacacttaaaatgctgttcacggaacctacggacgttccgccgaatttcattactttcatgaagatacatatttaaatacaatcccctcgagtatagttattacagggtgattggttgtttacgaaaaaattaaaattgagttttgcctacttacacaggcgtgaatcacgtagatacacaaatactatccattaaccccaaagggtcatggtacacatggatgtgactgtatgtggatagtacttcatcatagtctctgtttctaccattgtttttgataagtgtcgcaaaagtaataataaaaacgttcaatctatcacttttttcggtttttttctgataaaaagaacatcccgtctcttttccctcccataaaagccctgcacttttatgacattttgctatttatatatcgtttatattattatatttgcaaaaacaacagcataaaacctgcatatgaccccgttaaatactttcgtattgttaatatacaccggtgggacaattggaatgattgaaaacaccgcaacaggcgcattggagaacttcaacttcgagcaactccagaggcatatccccgaattgcaaaaattcaacttcccgattgatacttatcagtttgaccctccgatggactcttcggacatggaacccgatatgtggagaaagctggtacacattattcatgagaactatgatctctatcatggcttcgtcattttgcacggaacggatacgatggcttatacagcctccgccctgagttttatgctggaaggactggacaaacctgtgatccttacgggctcccaactcccgataggggtgctccgcacggacggaaaggaaaacctgatgacaagtatcgaaattgccgccgcacaggataaggaggggaaagcactcgttccggaagtctgcatcttctttgagaatcatctgatgaggggaaaccgtacgacaaagatgaacgcggaaaacttcaacgcattccgctcattcaattacccggtattggcggaagcaggtattcacattaaatataatcaggcacagattcatgtcaacaaaagcaagcaggagttagtgccacattatttattggatacgaacatcgtggttctcaagttattccccggcattcaggagaatgtaatagctacgatgttagggaccaaaggattaaaagcggtcgtactcgaaacgtatggttccggcaatgctccccgaaaggaatggtttatccgcaggctttgtcaggccagtgcgcaggggattgtcattgtcaatgtaacccagtgcaatgccggaatggtggagatggaacgttacgaaacggggtaccagctactacaggcaggagtggtctccggatatgacagtacgacagaatcggctgtgactaaattgatgttcttattgggacacggatatactccggatgaggttcgtgatcgtatgaatcggtcgatagctggtgagatcactctataaggaccttttgtttaatgcgttgaacagattttatccgaatttgttttgcgcgttgaacaaattatgcctatttttgtattccatagaaaacaaataaggatatggatacactaatcagaagatataaaaggttactaacagccacttccactacttatatcaggagcttaatggatacaatcaattgggataaccgactgattgccatccgcggagcacgtggagtcggaaaaacgactttaatgcttcaatacctgaaacttcattatgcaaacgatagtcagagcgccttatacacaagtctggatagtctgtatttcactcaacatacgcttagcgaattggctgaacagttttatctgaaaggaggaaaatgtctctttctggatgaagtacataaatatccatcctggagcaaggagattaaaaatatatatgacgagtttcccgaactgaaaatagtattcacaggctcctccttacttcaacttctgaatgcagaagcagatttgtcacgccgatgcatatcatacaatatgcaaggactctcttaccgtgaatatctgaagttatttcatcagattcatatccgcccctatacattggaagagatcttggagagcagtgacggaatttgcaatgaggtcaactctcaatgcagaccactggctcattttgaggattatctgaaacatgggtattatcctttttatctggaaggaaatgcagagtattatacacgaatcgagaatataacgaatttgatacttgagattgaacttccccaacaatgcggagtagatatcagtaatgtacggaaattgaaaagcctgttaggtatcctttcctccgaagttccgtttatggtggatatcactaagctctctgccctggcagaactctcgcgtaccaccattctggcctatctgcaatatttggacagagccaagttaattcatcttctttattcggacaacgactctatcaaaaagctacaaaaaccggataagatatacatggaaaataccaatttactttatgcgctgactttcaaggatgtgaacaagggcacattgagagaagtatttatggtgaaccaactttcttatctgcatagagtagaatactgtacacgtagtgcagactacacgatagacagcaaatacacaatagaagttggcggaaaaagtaaggacggaaaacagatagctggcagcaaaaaggcatttatagccgcagatgatatagaatattcagcaggaaacaaaattccgttatgggcattcgggttcttatattaaaggaaaaagaaaatggcaaaagaaaaaaccgtatatgtatgcagtaactgcggacaggaatcaccgaaatgggtgggcaagtgtccgtcgtgcggagaatggaatacgtatgtagaagaaatcgtacggaaagaaacgaccaaccgccgtccggtatcgggcatcgagacgcagaaagcgaaacctgttatcctcagcgaaatagaagccgatgatgagccgcgcatcaatatgcacgacgacgaactgaatcgtgtattgggcggaggacttgtgcccggctctctggttttgatcggcggagaacccggaatcggaaaatcgacactcgtcatgcagactgtcttgcgtatgccggacaagaagattctctatgtatccggtgaagagagcgcacgacagctgaaactacgcgccgaccgcctttcggaagtctccagcgactgtctgatcgtttgcgaaacttcacttgaacagatttacgtgcatatcaagaacaccagtcccgacctggtcattatcgactccatacagactatttccacggaaaatattgaatcatctcccggaagcattgcccaggtaagggaatgttcggcatcgattctccgttttgccaaggaaacgcatacacccgtcctgctgatcggacatataaataaagaaggtagtattgcaggcccaaaggtactagagcatattgtagatacagttctccagtttgaaggagaccagcattatatgtaccgtattctgcgaagcatcaagaaccgattcggaagcactgccgagctaggtatttacgaaatgcgtcaggacggattacgtcaggtcagcaatccttcggagttattgttaagtcaggatcatgaagggatgagcggagtagcgattgcttctgctattgagggagtacgcccgttcctgattgagacgcaggctttggtgagttctgccgtctatggaaatcctcaacggtcggcaaccggcttcgatataaggagaatgaatatgcttctggctgtcctcgaaaagcgcgtaggcttcaagcttgcgcagaaagatgtgtttctgaatattgccggaggattgaaggtgaatgatccggctattgacctggcagtgatcagtgccatcctttcttccaatatggatgcggctgtcgaaccggaagtctgtatggcaggagaaatcggtctgtcgggagagatacgccccgtaaatcgaatagagcagcgaatcggagaagcggaaaagttaggattcaaacggttcctgcttcctaagtataacctacaagggattgatacccaaaaactaaaaatagaattagtacctgtaagaaaggtggaagaggcattcagagcactcttcggataagtttaaattaatataaatccatgacacaagaataccaactccgcatccttcccgaaatcgcagcaaacgaacagcgactgaaagaatatatatctaaagaaaaaggcattaacctgcgtaatatcactgctacccgaatactgaaacggagcatcgatgcacgtcaacggactatctttgtcaacctgaaagtacgggcatacatcaatgagatgcccaaggaggatgaatacgaacgcactatatataataatgtggaaggcaagccacaggttatcatagtcggtgccggtcccggcggactgtttgccgccttacgcctcatcgaactcggactacgtccggttatcgtagaacggggaaaagatgtgcgcgaacggaaaaaagatctggcacaaatcagcagagaacataccataaatccggaatcgaactatagctttggtgaaggaggtgcaggagcctattcggatggaaaactttacacccgcagcaagaaaagaggaaatgtagacaagatactgaatgtattctgtcagcatggagcttctgcggctatactggccgatgcccatcctcacattgggacagacaaactcccgcgtgtcattgagaatatgcgaaatacgattatcgagtgcggcggagaagtgcattttcagaccagaatggatgcactgattattgagaacaacgaaatcaaaggtattgaaaccaatacaggaaagacttttctcggccctgtgatactggcaaccggacattccgcaagagatgtatatcgctggctggctgcaaacggtgttacgatagaagccaaaggaatcgctgtcggtgtccggctggaacatccggctatgctgatcgaccagatacaataccacaataagaacgggcgagggaaataccttcctgctgccgaatacagcttcgtgacacaagctgaaggcagaggagtttatagcttctgtatgtgtcccggcggtttcattgttcctgccgccagcggaccggaacaagttgtagtaaacggaatgtctccttctaaccgcggatcgcgttggagtaactcgggaatggtggtagagattcaaccggaagatttaattaatggagaatggaaaatggagaatggagaatgggctgcgcaacaaaatgagcagttattagccattaacccattgctgagcaattctcagctctcgactctcaatactcaacttacgccccttcactttcaggaggagttggaacgtcaatgctggttgcagggtggcaggcgccaaacggcaccagcacaacgtatgctggactttacccgcaagaagttaagctatgatttaccggagtcttcatatagtccggggctgatttcttctccgcttcatttctggatgccggactttatcagcaaaaggttatctctcggttttcagcagttcgggcgtagcagtcatggtttccttacgaatgaagcggtgatgattggtgtggaaacccgcacttcttcgccagtccgcatcgtacgggataaggagacgttacagcacgtcactgttcgcggactatttccctgcggagaaggtgcagggtatgcaggtggaattgtttcagcaggagtcgatggagaacggtgtgcggaagcggtagctaattatatcaatcattaataaatattctacggtcaaatgaactacaaacctgaaatagccattatcgagtccaataccctcacttgtctcggactgaaaagtatattggaagaaattattccaatggcaactatccgtactttccatagtttcagtgaactaatggatgataccccggacatgtatgcccattacttcatctcggcgcaaatctatgttgaacacaatgccttcttcctcccccgaaagcggaaaacaattgtgctggccagtgacagcccgcaattccaactgtcgggtgtgcctgtactcaatatctacgaacccgaagagaaactggtgaaaagtcttttgaagcttcatcaacatgcacaccacaacggctatcctgtaaaagatatgcccccgattgccatgccggaggtacatcaggaaatcttatctgcccgtgagatagaagtactggttctgattaccaaaggattaatcaacaaagaaattgccgacaaactgaatatcagtctgaccaccgtcatcacccacaggaaaaatatcacggaaaaacttggaatcaagtctgtatcaggattaaccatctatgcagtaatgaacggatacatagaggcggaccgaatctgatttcttaaaatatgaggcataatcctaataaatgaggattgcctaccttatatatttgccgttactttgcaccagacaaattaactgcgaatgaaaacaaagaatattatgattgccctcacactcctgacgacaggaacaacatgggctgaagatttccctaaagattctcttaaagtagtagacatcgaagaagtggtagtgatcgccactccgaaagaaaaccggaaactacgtgagctgccggcagctacaactgtattgtcacagaaagacatgcaggctaaccaagtgaactccgtgaaaagattatccggactcattccgaatattttcattccggagtatggatcaaagctgactacttctatctatattcgggggattggttcacgtatcaacacaccggctatcggactctatgtagacaacatcccctatattgataaatcagctttcgatttcaactactccgacatagaacgtattgatgtactccgcggtccgcaaggaactttgtatggacgtaatacaatgggcgggctgatcaaggtacacaccaagtcacctttcacatatcaaggtacagatatccgtatgggagcagcaacttataatgactacaatgtatcgttaacacattaccaccgtatatccgaccaattcgccttttctaccggaggattctacgaacataccggaggattctatcaaaactctgcacgcaataatgaacgggtagacaaaggcaatgcaggaggtggacggttcagaggtatttatctgccgaaagataaccttaaactagacttgaatgtcagctacgaatatagtgaccaaggaggatatccttacttttacacaggcatcacccaggaaggcgtcaacaagggaaagactgaagaacgggaagaaatgatcggaaagattgcatataatgatagaagcaactactaccgtaacctgctgaatgcaggatttaatgtcgaatatcaagccaagaatttcatcctaagcgctgttaccggttatcagcatctgaaagaccgaatgtttctcgaccaggactttactgaaaagaacatattcaatcttacccagaagcagaaactaaatactatttcagaagaaattgtgcttaaatcgaagcccaaccgtaagtgggaatggacaacaggtatctttggattctatcagacattgaatacagacggtccggttaccttcaaagaagacggggtaaaagaaactattgaaggaaataccaacagcatctttgaaaatttagggaataaagcacctaagatgagcatgagtgttcttaaccctacgttaagagtcagtggcaactttgatactccaatatggaacggagccatttttcatcaatcaaccttcaataacctttttaccaaaggactatccttcactgtaggtcttcgtctggactacgaaaagatgagtatgaagtacaattcggcaagcgacccactcaacttcgacttcaactttgccatgggccctatggttattaccgccaaagacctgatagcagatgctgcctacaatggtaaactatctgaagattatgtccaattattacccaagtttgccttacaatacgaatggagaaaaggcaataacgtttacgctacagtatccaagggttaccgttcgggaggctataacgtccaaatgttttctgatataatcaccgggcaacaggcgcactcgatggtagaagccattaaaaaaagcgcggagttcgaaaaatacagcacattgattgaaggaatgataggagacaaaatgcctgctatacccgaagtaaaagatgcaaccacctataaaccggaatattcatggaattatgaggtgggtactcatctcactttgtgggaaggaaaactctgggccgaccttgcagctttctatatggatacccgtgaccagcaactctctcaatttatcggcagcggtcttggacgtaccacaatcaatgcaggcaaaagcaacagctacggtgcagaagcatccctccgcgccagcctgaccaacgaactaagtctgaacgcaagttacggatatacgtacgccacctttaccgactatattataaatgaagcagacaaagatggcaacctaacagtaaaagctgactacaacggcaaatatgttcccttcgtccccaagcatacgcttaatatcggaggagaatacgccatcacctgtagctcccgttccatcttcgaccgtgttgtattccaagcaaactacaatgctgccggacgcatctactggacggaactgaatgatgttagccaatctttttacggcacactgaactggcgtgcaaatcttgaaaaagggaatgcaatgatcagcttctgggcacgtaacttcctggacaaagactatgcagccttctactttgaaacgatgaacaaaggatttatgcagaaaggacgtcccgtacaattcggaatagatctccgctgccgattctaagaaataacagatcaactgttcatatagtcctttggagacataccagcacagcgcttaaagaacttcccgaagaatgattgattcgagaagttcagctgttcgctgatctgctgaatggtcagctgactatcatttagctcaaaaccgtacgggcatgaacatgagctctataacattgccaacagaactctatatagctagatctcaacaacttatagtttcctatcatttcctgcaatggaaactgtcgtttcccggtgagggaacggccgttccttttaatggaaacgaccgttccttttaaagggaactggcgtttcctccgaggaaatgatgtgtactggttttagttgacaacttcgtttgttataactgaattagtttactcaatatactttaatatctaaataggtttacttttgttattcttattcctatgttagttgtcttttgttggtgcttgcaaatttatgcatcttcctttatttacgcaagccttcttcaggaaaatgtaatgttgccaacaaccaaaaactcttcggtcggggatcgccctagcggcaaggggcgggaccacccgtcccgacgagcgggtattatgctgttaatcctcccgtttcgctgaccacttccataggtgtcctcatgtttatcccttgatgaggccgcacatgattatatacatatacagcatcttcaatgcgcttgcttacttgctcgaagctctcatcatcacagtcgaatagccaaccgtttttaatggtgttgttcattctttcagccaatgcattatgtaaaggatcaccacactgcgtcatactgatgttgatttgatgctctttaagcctctctacatatttatttgagcaatattggacaccccggtcggaatgatgaataagagtgctcatgtctatgtgatacttctcatagaatgatattgccatctccaaagctttcaagggcccctccgtctcaagagttttgtaaagcgcatatcccacgatggcacgacttgacgcatcggtaagcaacgagaggtaagcccagccctgaccggtgtttacgtaggttatatccgccactaccatagcgcccaatcttgtagcgacaaatttgggtgcaacattcaacagatcggggtagatatagtaattatggttcgaattcgttgttttaggacgcttgcgacttgtacgttgacacaaaccattggagcgaaaaatgtcatagcaacgatcacgaccgataaccatctttggtccaaacttactcacgcagcaggcgtataactcgcgcataccagctttgggcatgagttccaacagttctttgcagtacaacacgatgcttgtggtaaggatatcaacctccaaatgtcggttcacatgcttgtaataaccttgtcgggttatgccgaagtaatcacagaggaactttatacaaccacgtttgcgtcggggtgagtgcctctgtgacaaggtgtcgattacttggcatcggagttttttcgtaccttgatatgatacgtggattcagcaagattgatgagttcttcgcacgcctcgtgacgtaaactctcatcagcaagagcccgatgaagtttacggttctcagcacgcaatagcgatagttctttctggagctcagaaatactagaatcaatagcatcgctatttactggtttagaggatctacccatatctttgtcttctatttgatacttgttaagccaataagtaagaagcttggcacaaaagccgtgacgcttacaaaactcagatttgctctcgggacttgataaatactcacgaatataagacattcgttcatcatcactgtaatagttgtactgctttttcgaatatttcatctttattttcgatttttgaagtgtcaacttattcagtacactacaaaaccaacgcttgctccatataatactgatgcttgatctatatggactaacaacttatctatgaacagactgcatgagaaaggtagcgcacaattaaagtattctttgataagcaatgcgctctgtcccgttcttgacatagatgatgccacagcgctgaaagccgtatttcgccagaatatgctgcataactttgttatcccgatgtgtatccacacggatattctcaaaatgttcaaagcaccagttcagacaggcttccgatacgcctttccttttaccgctggcagccatccggtggatgacaccgtaaggttcgtcattaagccatgcaccttcataaatattcagataagtaggatcttcgcctaatataaagcagaaagttcccaatatttccccttgttcgtccgtacagacaaaactatgaccgtcttctatctcctgacggataaatgattcggacggatagccgtcaatccattgggttgcattcccattggcacgcataaaagcacgggcataatcataaatctccatcaccaaagggagatctttcaattcggtaagtctgatttccatcattcagaagtatgatttgaatataaaaacaagatataaaagattattcattaatcgctccgcaatgggggcaaatacctttctccttcaacttctccccacaatgtccgcaacgatacttatagctgatattccgatgcaccttcttcgcaaaaacccagataaagaatgcaaggaacaaataaccgatataaatatgtgtcatcaggataaagaagaaatagcagaaaatacaactggacatcagtcccagcagataaaagaccgcagcggcgggagtcaactgccggaacaggtcatcaagcaccgccaaagcgacaatcagaaacaaccagatgctcaacaaaaagactgaaagtataaaaggcactttaaaaggcgataaggtgggattgaaatagaaatgttcccacgtatccggcacaaagacctgcattgattcgtaaaccgtcgcactgaaagccatcaacaggcaaagaaacaacggatagacactgtcaatatcattaaaatagaccagctgcaactgcttccggcggaaagcgcgaaacagatagactccgacaaacaacgcgaagataatcatgaaataagaagcatgcgtatcactgaaaaaatggatagcctgcgaaatactgtccgtcggcacaaacgattctttcaattctgtttcacgtatccacccctgctcctcttgtgtatgcgccagctttacccagacactgtccacactatcggcagggtgaatggcaaactcggcaacaaccacccgatctcctttatacaatgcaatgtaggtgtccttgatgggcaggcactccattgttaccgagtcggtggttacttccagattcgtattccaggtataatgccggtcataaagatagttcagagaatctcttgtcttctccgacagttcctcggaagtaagatcgggacgcgtatagtgacaggatgaaaggaacagcagagtcagcaacatccccacgacagaacagcacaaagctgtacgaaacttatctctgccaagaacaagctccgttaaactccgcatatctctgccggggaatcgtttcattgtgccgcttttactttcatttgacagtttttgcaatcgaattcaaggcggaaacgttttccgtcattcgataccagataatagggctctttataaggcgagcgcactcgctgatggatagggcaccagcccatgctataacgcaggcagtgtttgcagaacatcagcacggcatcttccacccgttccttttcataagcctcagccacttgctgcactccatgttcccgataaaaagaagctgcacgggtgttcatcacgtttcccaaataagtaagtgcagcctgcggataatcatgtgaagtcggcttccagacagccagttcctgacgataattgatacgtcggacagcaatcagcttttctatcgcctggcggcggaagtccgccaaaacagaagccggtaagaaccaattctccgagaaagagatctcgatcttttccgcttcgaaaggcgtgttacccaatttagcaagctgcgtcttcaagttatcagcctgtggagtccgagccggctctttctcacgaggcagagtgagcgtaacgctgttatcgtcctcatccgtcagtgtcagagagaaaccgaagttgttgtctgcaagcagtatgttaacggcaatcttccgttcggccgacttgcgggaaagtatgcgttcaaactcctgatcgaagttgcgatagagcttggtacggggcttgatgcggggcatttcctgaggataaagtttgtttccatccacccgattaatccggaatccctgcaaacgtccctgttcatcaatatagcagacaccgtctccgttattaaatgatttcagtccggcaacggtcagaaagttgccacgggcttctttcattgtacccatctcctctcccaatgatttcggagtatcaaaagaaaaaatatcctcactgcgtccatgcaggaagtaatgagtaaatccacgactgaaactcttgtccagctgcggtttaaaatcgaaacggcaagtgccggaagaagcgcgcacatattccggtcggcgggcaaagatagcatctagtttctgacgataggcagccgttacattcttcacataagacacatctttcagacgtccttctattttgaatgaggaagctccggcatccagcaaccgttccagttcatcactctgattcatatctttcaaagagagcaagtgcttgtctttcacaatcacttttccttccgaatcgacaagactgaaaggcaagcggcaaaactgcgcacactctccccgattcgcactgcgcccgaaacaagcctgactaacgtagcactgaccgctatagcttacgcaaagcgccccgtgtacaaatacttccagcggaacttcgggacaaatttcgtgtatcttccttatttcacgaatcgacagttcccgtgccagaacaacctgacggaaacccgcttcccaaaggaacttcaccttttccggtgtccgattgtccatctgcgtactggcatgaagaggtatcggcggaagattcagtttcgtgattcccatatcctgcacaatcagggcatccacgccaacccgatacagggcatggatcatctcctccgtctctttcaactcttcttctttcagaatcgtattgactgtgacatagatacgggcattatacaagtgagcatgttttaccaacgcttcgatatcttccagagaattcacagccgctgcacgggcgccaaatttaggtgcaccgatatatacggcatctgctccgtgattgatagcttcgataccacattccagattcttcgccggggcgagaagttctattttacgctgcttgatcattcaatatcattaatgttgtaaggcgtttcctgataaacaaagtagttcagccagttggagaacaaaaggttggcatgagcgcgccaacggaccaacggacctttgtccggatcatcatctacgtaatagttacggggaatttcgatcggcagtcctttacccagatcacgacgatattccgtatccaaggtatagggagagtattccgagtgtccggtcacgaagaactcacgtccgccacgtgccatagccatataaacgcccgcatctttcgattcggaaagcaatgtcagttccggcactttgaggatatcttccctgcgtacttccgtatggcggctatgcggcacatagaagcaatcgtcaaagcctcggaagatagaatggaaaggttccaacacccgatgttcgaagataccgaacattttctggtccagtggatacttgggaactccgtagtgatgatacagtccggcttgcgcagcccagcatatatataaggtagacgtcacgtgcgtacgtgcccaatcaaatatttcggtaatttcctcccaataagtcacctcctcgaagtccatctgttccacaggagcaccggtgatgatcatgccgtcgtatttctcgttacgcatttgctcgaagtcggtatagaacgtttgcatatgttctatcggcgtattcttggatgtatgactcttgatcttcataaacgagatttctacctggagaggcgtattcgagagcagccgcaccaagtctgtttccgttgtaatcttcaacggcatcaggttcagaatcacaatccgcaacggacgaatatcctgttgcgtagcacgcgaagtatcaattacgaaaatattctcttccttcaataattctattgcaggaagcttatcgggtaaatttaaaggcataatcgctatatattagtaatttggctgcaaaaatacgaaaaatatagcacataatagggaggttgcttatttagaagacgtacaaattaagtcaatttaatcaaagaagcataccaagtaatgaataaaagctttatttttgccgaacgaattagtactaataatttaaatcttaaaaaaatggcttacgtaattagtgacgattgtattgcttgcggaacttgtatcgacgagtgtccggtagaagctatctctgaaggtgatatctattctatcaacccagatgtatgtactgactgtggaacttgcgcagacgtttgcccgtctgaagctattcacccggctgaataatacaatctacaaaaaagtataggctgctttctacggaaggcagcctttttttattttatcgctacggacaaaaggaaattacataaaaaaacggtagggatattcagtaaatgtccctctttctaataaattaagagaacagttttactttacgtgagcttttctcttattttttttctgtaaagtctcaagttttctatctttttcatagaatattatttacatattcttattttttcttcccaacgttacattatgtatatgtctttttaggggaagttaaaaacctctcctgttttcctcttattattttagtctgattatgcagccgttctttttttcttttcgaccttttctatcatgcataccgcattggccgtatgtattccaaagaaaatccaaagcatttccgttttcctgtttctagcttttattctggccagtgagtaatgttgtttctgcgttccaaagcttccttccagccgggtagctctttcacggctgagttccgaccgtaagatcttccgaagtggctcatctttggcagctctgcccttacgcttaaaggaagtacttatatgatatttagtacaaaatttccggttggcattattagcatagattgaatccgctgcaagcgccttaaccctaaccttggtcagttgttgttgcagatgaatacagtctttcaaacgtactccttcgttaaaagccttaaaggagatatgttctataaacgagattccatctatctgtatattgttgactttggctccgaattcaacggatttggtttccttgcctctgataatggggcgaaggtaatgccggtcgatactcacgatacggttggacacttttttgcctgcaaataaattcttcccttgctcaaggaccgtctgtatgaccgagaaacgtctttggtaatcagaggatagtgtaagcctattcctgtaggatgaatgaatctgctccagctggtccagtaacttttccaataactgaagtagcctgcgtgtaatcatacgggtctgtgatttccttcgtttacgcagtttactgtaagcaaggtaggcacggcttacatcaagatacttattacggggacgttgtatgtgcaatctccggcaatgtttgcacagatgacgatgaagccatacaataccttcccataagagtttgacatcagtagggaaacgcagatggctttcataacaggtggcatccgtcatacagacatgaaggttctcaagataaggtttccaatggtcagccagaatagcctggagggactcaatatcaaggcgatccgctagttcctgacgaattgcactgacgattttaggattgggcagtggatgaagcggatcaatctgaacaccacaaaataactggtaatgaatattcccgtttaaatgttcaatcagttgtgaatctgaaaagttggtataggacttaaggaccatcaaggctattttaccctcaggagaaaaataacttttacgacccaaagcagaggacttcaaatgcatttcccgggccagttccgagaaaggaaacagagcatggaggcgacctaattcactcgttgcaaaactttgacgatatttttttagcatatcgaactcagtaaaacctaaacgaggttcgatttctgagattttttgtatctttaccatgtgtttttagtttagattaccccagttttggccgtcaaaccgttttttggggggaatgcttaaagatacaaaaaaggcaactaactcgcaatgaattagttgccttaaattttattattttaggaatatcccacggtagactttctttttcaggagatagcctaccgttctatattctctaagattgcttatttcaatttagccaatgcttccttgattcgacggatagcttctacaatgttttcatcacttgtagcgtagctcatacgaatacattcaggagcaccaaaggaagtaccgcctacacaagctacatgagcatcttcaagcaggtacattgccaggtcgtccgagttttcaattttacgttcgccgttgctctttccgaagaagtagctacatttcgggaacagatagaaagcaccttgcggtacgtttacttcgaaacccggcacttctttagccaacttcacaatcaggtcacgacgacgttcaaatgccttctgcatttctttcaccggttcttgtgtacctacgtaagcagcctcggcagctttctgagataccgagcaaggacccgaagtgtattgtccctgaagcttgttacaagctttcacaatccattccggaccagcaatgaaaccgattctccacccggtcattgcataggctttggatacaccgttcacgatcactgtacgttctttcatttccggtaactgagcaatgctctgatgtgcaccgatataattgatatgttcgtaaatctcgtcagcaattaccactacttgcggatacttagccagcacggctgccagtccagccagttcttctttgctgtaaacagaacctgtggggttggacggagaacaaagaatcaatgcttttgttttcggagtaatagctgcttccagttgttccggagtaattttgaaatcttgttcgatgccggcagaaacaatgacaggagtaccttctgccatcttcaccatttccggatagctcacccagtaaggagccggtacaattacttcatcacccggatttaccaataccaggatcgcattacatacagattgctttgcaccattggcacaagaaatctgagcagcagtatattcaagaccgttctcttttttcagcttctcaacaatcgcattgcgtaaagccggataacccggtaccggagagtagcgagaaaagttatcatcaatggctttcttcgcagcttctttgatgtggtcaggagtattgaaatccggttctcctacacttaagttaataacatcaataccctgcgctttgagttcgttgctcttttgcgacatggcaagcgtcgccgacggcgacaagctgttcaaacgatctgataattgattcattttgtatctattttattgttgttgagtgaaattcgttgcaaaataagcgataatattcgatatatgaaaacaaaatggcattttacttattaaaatgtaatgtatgtcccattctttctttctttgttctcagatatcgctcattataaggattaggaactgtttcaacaggtacattttctacaatttccagcccataggcttccagccctacacgtttcacgggattatttgtcagaagtttcattttgtgcactcccagttcacgcagaatctgggctcctactccatagtcgcgttcatctgccaggtgtcctaagcaaaggtttgcgtcaacggtatccataccgtcttcctgaagtttatatgctttcatcttttccatcaaaccgataccacggccttcctgattcagataaaccaccacaccttttccttctttttcaatcatttccatcgctttatgcaactgctcgccacagtcacaacggtgtgagccaagaatatcaccagtagcgcaagatgaatggacacgcaccaagataggttcgtcttcattccatgtacctttaaatatagccatatgctccagtccattcgatttctgacggaaaggaatcagacggaacataccatgttcggtcggcatatttacctcaacgcctttttctacgattgactcctgtttcagacgataagcaatcaagtcatgaatggaaatcagtttcagtccatgttcatcggccattgcacgaagttccggcagacgtgccatcgtaccgtcatcgctcattatttccatcagagcacctgcagggtaaagtccggcaaggcgtgccatatcgatggtagcttctgtatgtccggcacgacgaagtactcctttttcctgtgcatacagcggattaatatgtccgggacgtccgaaagtagccggtgtagaagtaggatcggccaacgcctgaatagtagcagcacggtcggaggcagaaactccggtactacaaccttccagtttgtcaattgtcactgtaaaaggagtgcccaatacagaagtattatcactgacctgatgcggcaaatccagttctttacaacgcgacaccgtgataggcgcacagagcacaccacgcgcatgtttcaacataaagttaactttctcaggagttatcttttcggcagctatgattaaatcaccttcgttttcacgatcttcatcatccactacaatgacaaacttgccttctttgaaatcggcaatcgcatcttctattctatccattttaatctcttccataacacttatttattaatattctgtatgatgaattgaatttgttcattgttttttattatccgttccatatctttcgccaaccggacacggaatgcccagatacggaaataaaagaataatcctatagggaaaataaccccggcagccagattcagccaataggtgtggaacgggcgtatatgagcagaaacggaaataatcggataattgtttaatgtgttcagcaaagtcacagacttcgtattggacatctcctctatgagtgtctctaacttttcattgatagatatcatctcatcatccttctcgcccgacatccacagcttaaaataattcggggctttcatcaggcgatttttagctatatactctttgcactcgtcagtaagtacctgcaaatcacccggtatgcgagtataatccggatcgtgaatcaccacctctttcttgaataaatgacgtatgttacggataccgacaatcttcttaaaccaattgatatacgcatcggcattgagcactacagagtctttatttgatttgtaagtcaggaaagcacctaacggggcaagcacggcactactggtccacactcccatccatacgacccatctgccgtcacgtgccatcttatagcctgtattatctatgatataataaatgatgaataccatcaccgaaacgatgaccggcataccgagtcctcctttacggataattccgcccaatggggcaccaatgaagaagaacagcaggcaggaaagtgaaatagtgatctttttatgccactctatctcatgcttccgcatactataatcatggctacccatcgtgtaactcttgaagtttatatcactgctcaggttttccgcacgacttgcagcggatgaaatcaccttctgcttctgcatcaaaggagctacctcatagagactgtcgatattatattcagtaatattcgcctccataatcttgaccgtatcctcctttgtcaatccataggtgctacggaaattcccttcagaaacttcccggtaatattgtcttccgatactatcacccaccattttcattgagtcgatggaggcttgcagcatcgacatatctttggcagcagatgtattgctcataatactggcatccgccatattaaagtctgagtcaaactcaataatcgtatgtttttcccggaattcttcccgacgatacggtacattctgagatttcatactctgtgatctcaggttttcaaataaatcaccactgtacaaatgcagccagagatgctgcttgtctgcagtcatttccatccgtccggaatctgcataaataatatgtgcgttctcaaatccatctttcagattataaatcagcacatcatacatcatacctgtcttccggttcttcttggctatcttcaggttataatccggtatttccgaataaaacaccccctccgggatatccaattccggagacttttgtttcatcgaaataatcagtgtgtatagtttcgtctgagcaataggccccacgacattctggaaataaaaagagacagcaaccaaaccacagacaaagaaagccagcgggcgcataattttaagcaaggatatacccgcagctttcattgcgagcaactcgtaacgttcgccaaagttgccgaaggttattaaagaagccagcaatattgccaacggcaacgatattggcaccagtgtcaatgcggaataaaagaagaactgagctatcacactcatatccaatccctttccgactaactcgtctacatatctccacaaaaactgcatcatgaagatgaagagacagatgaagaatgtacctataaagagcatcaggaagctctttacgataaatatatctaatttctttatgcgtagcatcttaataggttcgtgcaattaagacgcaaaattagcacaaaaaaagtagcatagaaaatttttagttgaaagttaactaaaaaccacacgttcttctcaatttcgccacttgcgactcccacaattctttcatgtcagcaacttcgtccgcctctgcgaagtctgtaatttctaatacatagtcacttgtcagctcattataagtcattttgatttcaaagtaatcgcgttcattttcgtcatcctgccaacgaaagcgaataaatgagaaagaacggatcgcaataatctcggcatttctttgttcagtcttcccccaatggaattctacgattttatcatcagatactactttatcagcaaaccagtcctccagcccggtcggtgtgctaatagctgcccaaagaatatttttagatgttgcgttcaacaaatactccaaatgaattttttcttttttcatagcaatttcgaattgtttttacgtgtgccaagataaatacttttttctaattatgtggcataaatcagacactttatttaaaacttatttcttttcaaggccccaaactccctatttataggaaaaagagaacctcgttctaaagaaaaaacacaaaaaagttatgaattgttttggagattacagaaaaatatctatctttgcacccgcaatcgagaaatgatggcgggatagctcagctggttagagcgcatgattcataatcatgaggtccccggttcaatcccgggtcccgctacttgataagaataaggcatttgagaggcttccactcttgggtgcctttttcttttatacatcaattggtggcaggtgacgccataggtgacgctaaatgcaaaaaattagcccccgaaagtttatattcagcttccgggggctattctatttaatgctctatactcttattcccattcaatagtcgcattaggtttcggcgacatatcatagcaaacacgattcacattcttcacttctttcagaatacggtctgtgattttcatcaggataggccagtctaccggttcaatagtagctgtcatagcatctaccgtattgacagcgcggataatcaccggccaatcgaaagaacgggcattatcgcgtacaccaacagatttaaagtcaggcactacggtaaagtattgccatacctttttatccaggccggcaatttggaactcttcacgcaaaatggcgtcagactcacgtactgcttccagacgatcgcgtgtgatagcacccagacaacgtacacctaaaccaggaccggggaacggctgacggtaaaccatctcataaggcaaccccaactccagaccacaagcacgcacttcatccttgaacaactggcgcaagggctctacaagctggaacttaagatcttcaggcagaccgcctacattatgatgagatttcaccatcttggcagtcttcgttccgctctctacaatatccggataaatagtaccctgacctaagaaatcgataccatccagtttacgtgcttcttcttcgaacacacggataaactcaccaccgataatcttacgtttctgttcgggatcttccacacctgccaatttatccaggaagcggtctgttacatctacataaaccagatttgctttcaattggttgctgaatacttcaacaacatcttcagactcacctttacgcatcaagccgtgatttacgtgcacgcataccaaattttcaccgattgccttcaaaagtaaagcagctaccactgagctgtcaacaccacccgacaatgccagcaatactttcttatcacccacctgacgtctgatcagctcgatctggtcattgacaaagttcgccatattccagttagcttcagcctgacaagtatcaaatacgaaagactttatagcagccttaatagcctcgatatcatctgtaaatgccggaagcttcactgcgcaagtcgctttatcgtgaccggcagccataacaggaatccccatcgtataaatagacggattcacgtcaatagcaacaccgtcgatcacgttgttcagtccaccattgataataataccctttacgttgggcaatgctttcagttcttctactgtgatgtcgtgaggataaatctcactataaactcctaatgcacggatggcgcgcgccaataccgtattctcgtgactacccaagtcaaggataacaatcatgtcctgtttcatctgattttggttcttttaagttattatattgtataaatttgactttaacttcaattagtctgcaaatataaagattttaaaagacgctgcaatgtcttgattcccaaagtttcatttcaaattaaatcagctaccacatttatttatcacagcaaccgcctcggacactttccgaacattctcttttatgctttcagtcgcatcacaaaccgacttccttttcccagttcactttctactgtcagcgtaccgccatgcgcttccacaaagtctctcgaaatagacaaaccgagtccgctgccctgaacttttgttccgggaacacggaagtaacggtcgaaaatactcttgtggtaacggggatcgatgcctttaccgaaatcctgaacgtacaggtcgatcatatctccttcctgcctggcaccaatcacgacacgcccgttttctttagaataacgaatcgcattgctgagcaaattagtcaatacccaagctatcttttcactatcgacaaagagcttgccgattttctcttccgggtactctacttctatctgaatattgaacttatccgcttgtacctgattagctttaatcgcatattctatcagttcaatgggcttcgttatcttcggcattaattgcagcttgcctgcctctacctgagtcatattcagcaattcgcccgtaatgctcaacaggcgttcgctattttccttgatgcttttggacaactgttcctgttcatcattcagctcaccgacacgtttatcttccaatagctgcagactcatcatgatagccgcaatcggagttttcaattcgtgtgaaatggtcgaaataaatgtagtcttggcagaatccagttccttgaattccgttatattcttcagcagaatgacatcccctaatttgctgggttcatccttccctgcatccgtatttatgataggaatataggaagccttgaaataactctctttatcatcggcatatatctttaacggctctttctgatctcccggcgtcaccagttcacgaatcagccggcgaagcagatcattcttcaaagacaattcttccgcagatttacgtatgacattacctcttttcagattcagcacgttcagtgcttcctcattaataaacaaaatctcacgatccatattcagaccgattatcggatcgtcgatactgttcacgatggcctcaatgaatttcttggcagaaagaatatccgctaacgtacttgcccgatactcggccagacgttccgccatacggttgaaactctcggcgacttcccgaaactcctgattatttctcatatccagccgttcttcataattatgattggctatttcaagaatcccttgtttcagttccttgatgggtttactaattgttcggggcaaccaatacagcaatgtcaatccggtcaatatacaaataccgccggtaacggaaatccacaacagagcgcgttccaatgccggcatagcggcaggactgtcaggttctgtggcagtcagcaactgaaggttcacaacagaaagtgttaccagcaaaataatcattcccgccagcatcccgatgccgagaatcagttttgttttaatattcatatcgttcatacggttaatattatgcaagtataatcaaatctacattagcttgtgacaaattattcaaaaactttcgatatccgagtatggagcaaatggcatgaggaaatctcagattaggagttcccatgcagacagaagatatttgcttgtcccgacaaactttgacaatactccccagaatatccttcgactgcacctggatgacctctccgcccagttctgccaccagtttaaaatgattcagcagataacgctggctggccagatcaatccggtccatactctccctcggagtctgcacatagagagcaacgaaagtcgtattatatcgtgttgccagacgtgccgccttccggataatcctcctgggtgttttctcatgactactgatacaagccatgaacttctcatgcctgattccgaccgagacacccatcacaacctcattctccaccttcttctccacccggagcgccacttccttcagagccagttcccgcagttgaaggatattctcggtccggaagaaattatccagcgctgtctgaatcttttccggacggtatatctttcctgctttcagacgcgagatcagttcttccgctgtcaagtcgatattcaccacttcatccgcttcctgaagcacactgtccggcacccgttctttcacctcgatccctgtaatctcctgcacttcttcattcacactctcgatatgctggatattgattgcggaaatcacattaatcccctcatccaacagagtcatcacatcctgccaacgtttctcgttcaaactgccttccacattggtgtgtgccagttcgtccacaatcacaatctcgggatgaaggcggataatggcgtccacatccatttcctccaactcttttcctttatagaaaattttacgtcgggggatcacaggcagcccctgcatcagagcctccgttccggcacgcccgtgagtttcaatatagccgacttgtacatccaccccattctccagtagttcatgagcctcctgaagcatacggtaagacttccctacaccggctatcatgccgatatagattttaaacttgcctcgatgagacttcttgatcagatccaaaaaatgttgtacactctgttctctatccatatccatttcattaattgctgtttataaactatttcaacccgtagtaatcatcacgatcaccacgggtttctgcataataaaaattcatgagtttatatctatggtcttaaagttacgccaaaaaccaaaaaagcatcttcaacacatggattccatatagcctgtgcaaatatcggcaatgaaaacttatcattaatttttatctctgtcattccttttaaagctacattagtcacggcgaagccactattcgtgtacataccctccgccttatacggtactgcgccgcaagttacatttaaatcgacatttttcacactgaaaggatagttcagttccagataggaggaataattctgtttcagttctccgctatcattcagcttcttgtcttttccggcaaacatcgtataccacgctacggacaggggaaacttctctacgggcaacgtataagccaatcccgcctcaaaatgatgtcccgtctcgtggctcttaaaattaaaatatttatatgccccttcaccttcccaccacaaatcggcaaccgtcagcgtaggtcccgcctcaccaaacttataggcaagagtcagatccagttctttattccctccactgaaattagtagatccccatgcggtaacagaaaaattatcgagcccaaaccccagcgtgggttgaaaagccgcacctccaccctgatacattccccgccagacataggaactgacaatatctccctgcacagtaaattcctgtgcttttgcatccgttatacccgatacgcatacagttgccgtaaccaatgctcctacaacaatcttcttactaaaaaaactcttcatatttatctttttattttatgtttctaaaaaagagcagcgtcctgtccagccctgtttatttgaaccgcaataaataactaaaacgattcggacaggcacgccgcccagtgtttggttatttattctcttcaagtgctatattcagcttcagcacatttattttctccgttccgaaaattccgagtaaaggcttctccacactttgatcaacgatttctttcacttggttttcagtcaggccacgtgcctgtgccactctctttatctgcacgtatgcacattgcggagtaatattggggtcgaggccggaggcactcgccgttaccatctccgccggaacatctttacggctcagataaggatgatgtacaaggaacgtatcgatacgcgcttccacttcagccagatattcgggattcgtgggtcctttgttgctaccggacgaactagaagcatcataaccgtctccggcacacgaaggacgtccccagaaataaatatcttttgtaaacatctgaccgacattggccgcacccaccacttttccatccagtgtggcaacttcagcatttcccttattaggtcctgccacttgtgcaaacaaccacaaaataagaatatagaatacggagaaaaagacacagaaaacaagagttatctttagtgatttaaataaagttttcatcgctattgttttttaattaaaagaataaacctactaataaatcaatcagtttaattccgataaacggagcaatcacaccacctacaccgtaaatcagcagattccggcgaagcaaagcacttgcacctatcggcttgtactgaacgccacgcaaagccaacggaatcaagatcggaataataatcgcattgaagatgactgccgaaaggatcgcactctcaggactatgcaactgcatgatattcaacgccgccagttcggggatagccaccataaacaaggcggggacaatggcaaaatatttagccacatcgttggcgatagagaaagtagtcagtgttccacgggtcatcagcaactgcttaccgatttccacaatctcgatcagtttggtaggatcattatccagatctaccatattgccggcttcctttgcagcctgcgtaccactgttcattgctactccgacattcgcctgagccaaagcgggagcatcattcgtaccgtcccccatcattgccaccagtttgccggactgttgttccttcttgatatattccattttatcttccggcttcgcttcggcaataaaatcatcgacacctgccttttctgcaatatatttggcagtcagcgggttatcaccggtcaccatcactgtcttcactcccattttgcgcaagcgttcgaaacgttcctgaatacccggtttgatgatatcctgcaattcgataacacccgtcactttccgattaacacataccaccaacggcgtaccaccattgcttgaaatagcagcgatcaccttttccacttcttcggggaatttatttccggcagtttccacaatcttacggatagcatcaaaagcccctttacgaatctgagttccgtccggcaaatcgacacccgagcatttggtttcggctgtaaacttaatcattcgcgcgcctgtcgtattcaagctgcgcatacggatacctgattcacgtcccagttctacgattgatttgccttccggagtttcatcggacagagaagaaagcagacagttttctacaaaagcgtgcagatcaatgcccggcgcagtgtgaaaatgggtagctttacgattaccgatggtgatagttccggtcttatccagcaacaaggtatcaatatcgccggcagtttccactgccttacccgattttgttatcacattcgcacgtagtgcacggtccataccggcaataccgatagcggaaagaagtcctccgattgttgtcggaatcagacacacaaacaaagaaataagtgaagcaatggtaatgacagtattgctgtaatcggcaaacggttttaacgtcacacacacaatgacaaagacaagtgtaaaaccagccagcagaatagtcagtgctatctcattcggagttttctgacgagacgcaccttccaccagtgcaatcattttatccagaaaactttctcccggttgggtggtcaccattacttttatatgatcggacaatactttcgtacctcccgtcactgagcttttatcgccgcccgcctcccggatcaccggagcagactcacctgtaatcgcactttcatcgatagaggccaatccttcgattatttccccatcggacggaatcacgtctccggcttcacagacaaacacatctcctttctttagttgtgaagaacttacagtcactatttgattaccttccacctttttggcaggtgtctcttcccgtgttttacgcaggctgtcggcttgcgcttttccccgtgcttcggcaatcgcttcggcaaaattggcaaacagcagtgtaataaacagaatgataaacacagctatgttgtaggcaaacgaaccctgagagggattgatgatggagtaaagtgtcacaaacaacatgaccactgtagccacctctaccgtatacatgatcgggttctttatcatcagtcgcgggtttagcttcacgaatgattgtttcaggctttctataacttgctccttttgaaacaaagaagctgatttcatatttttcatatcttctctaattcagaattacaaacttaaatgttcggcaattgtactcaaagcgtgtaccgggaagaaggacagagcagccacaatgaagataacgacaaacgtcattattccgaaagtcagcgtatcagtcttcagtgttccggcactctcgggaatgaacttcttctgagccagcaggccggcaatggcaacttgtccgataataggcaggaatcggctaagaataagtacaataccacaggtccagttccagaaataagtattatctcccagtccttcaaagccggaaccattgttagcggcacaagatgtatactcataaagctgctcactcaagccgtggaatccaagattgttcagccaaccgccctcgctttccacaaagtcaggatgatgtacatatatataacttgagattgctgtgaacactaatatgacaaatggatgaagcagtgctactatcgtagctattttcatttcacgggcttctactttctttccgagaaattccggtgtgcgacctaccatcaaaccgctgataaataccgcgataataatgaacgtataataattcatccaacctacgcctacaccgccgaaccaagtattaatctgcatattcagcatctccatcataccggacaacggcatagtagaatcatgcataccattcacagaaccattggaagtaacagtagtcacaatgctccaaagtgctgtagctccggcacccaaacgaacttccttaccttccatcgcaccgttatcctgcgcaattcccagttcatcgatacggggatttccacccatttcctgactgacattgatacagacgcctaccaggaaagcaaagagcatcactccgaaaatactataagccagtttctttctacgagtataaaaccctaatgcaagtaccattgccatcggaataatcaagatagaccagcactccaccatattggtaagataagtcggattttccaacggatgagaagagttcacaccaaagtaaccacctccattcgttcctaattgtttaatgggcacaatggcagccgcaggtccttgcgaaaccatctgttcctgtccttcgagggtagttaccttcatttttccgtcgaatcccatcggggttccctgaagaatcaggataaaacctacaatcaaagaaagcggtaacaggatacgggtacaactcaacaccagaaaatgccagaagttaccgattgtttttgttgtcttggcagccatactcttcattataccagccatagcagccataccggttgcagcggtaataaactggaagagcataatgacaaacaattgtgtgaagtaagtcaatccgctttcgccactatagtgctgcaagttacagttgaccataaaactgatacaggtattaaaagcctgatccggcgtttggggaccgttgccatccggatttaaaggtaaccatccttgcgaaaccagcaataccattccccatacgaaccaaaatgcattcaatatcaataatgctttcaggaactgtttccagttcatttcttctttagggtcaattccgcatactttataaatgactctttcaataggagccatgaaatccgaccaggttttctctcctttataaaccttggcaatgtatcttcctagtggataagccaaaatcaccatcaaggcaatttgtgcaaccacacctaaaatttctgtattcatacttttaccttaaactgtataactttaaaacttttcgggtctgatgagtacatacatcaaataaccgaagattgcaatacctaatacaaatagtgctgtgtacataattaattctcctttcctcttctagatcttttcaaaccagtctacacatttccaaaatagccagaagcaggcaaagccgctcaagaggcaaaaaacaaatgatagtgttatctccatgtctttaatcttttaaatatttattattataatacttgcaatgtattatgccaaatgcgtgccaaaactctaaaataaattggaatacattgattatcaaatacatataaagaagaaagaaatataaaacagcagagccgacctttccattttgaaaaagcagttcaattttgaaagggtatttagtcttggcagaatatgggattttaaatgaaatagaagggaaaagaatgaacttgaaggaaaaagaggctgaaaaggatactgaaaagtagtattgtaaaagattatccggtcgtttgttttttagcagaacagaagatttgaagtatgtggatgatatgtgcttaaattcctaaagtatcaaacacaataaagcccttctggtatttctaccggaagggcttctctaaaaatggcggctacctactctcccactgttacgcagtaccatcggcgtgacgaggcttaacttctctgttcggaatgggaagaggtggaaccctcgtgctataaccacctgaatttcttcaattgacaatggacaattgacaaatgacaattatcgcagctgtcatgataagttatgacatgataaaaagtaaaattcaagtatctgttaatctaattgtcaattgtcatttgtcaattgtcaattaaaaaagctaaacgtatatatcgcgatccgcaccgtccgaaagaaagtgaacgggcaattagtaatgctcggctttgatgttaccacctttacacctgcatcctatcaacgtcatcgtctttaacgaccctaagaaatctaatcttgtggctggcttcgtacttagatgctttcagcacttatccaatcccgacttagatacccagcaatgcacctggcggcacaactggtaaaccagcggtcagtccaacacggtcctctcgtactagtgtcagagccacgcaaatttcatacgcccacgatagatagagaccgaactgtctcacgacgttctgaacccagctcgcgtgccactttaatgggcgaacagcccaacccttgggaccttctccagccccaggatgtgacgagccgacatcgaggtgccaaacccctccgtcgatatgagctcttgggagggatcagcctgttatccccggagtaccttttatcctttgagcgatgtcccttccatacggaaacaccggatcactatgctctagtttcctacctgatcgacttgtaagtctcccagtcaagcgcccttatgccattacactctgcggacggttaccaatcgtcctgagggcacctttagaagcctccgttactattttggaggcgaccaccccagtcaaactacccaccaaacagtgtcctcgtaccacgagttagaactcaaataatcaaagggccgtatttcaacagcgactccacaaatactggcgtacctgcttcgaagtctccggcctatcctacacatcaattacccaaattcaatgttaagctatagtaaaggttcacggggtcttttcgtcccatcgcgggtaatcggcatcttcaccgatactacaatttcactgagctcacggttgagacagtgtccagatcattacaccattcgtgcaggtcggaacttacccgacaaggaatttcgctaccttaggaccgttatagttacggccgccgtttactggggcttcaattcaatgcttctcttgcgatgacatctcctcttaaccttccagcaccgggcaggtgtcaggctgtatacgtaatctttcaatttggcacagccctgtgtttttgttaaacagttgcctggacctattctctgcgcccaactctcgttgggaccctttatcccgaagttacagggtcaatttgcctagttccttaaccgtgaatcactcaagcgccttagtatattcaacccgactacgtgtgtccgtttgcggtacgggtacctcaaggattaagtttagcggattttcttgggagtatgattacacgcactattggattgttccgaagaacgctccatactatcaggttcgactcttatcccggatttgcctgggataatcaacatctacacccttcaacggactattccgtcagtccgcggcgctgtcacgcctccgtctccacgtcactccttaaggtagtacaggaatattaacctgttctgccatcggcctcaccgttcggctgagccttaggacccgactaaccctgatccgattagcgttgatcaggaaaccttagtctttcggcgagggggtttctcaccccctttatcgttacttatacctacatttgcttttccacacgctccagcaaagctcacgcttcaccttcgacgcagagtggaatgctcccctaccgatcattactgatcccatagcttcggtaaaacacttaatgcccgattattatccacgccaaactcctcgactagtgagctgttacgcactctttaaatgaatggctgcttccaagccaacatcctagctgtcttagcaatctgacttcgttagttcaacttagtgtttatttggggaccttagctgatggtctggattcttctcctttaggacatggaccttagcacccatgccctcactcctgtgatagaactaatgcgcattcggagtttatcaagacttgataggcggtgaagccctcgcatcttatcagtcgctctacctcacattagtaactcacaaggctgcacctaaatgcatttcggggagtacgagctatctccaagtttgattagcctttcacccccaccctcagttcatccggaagcttttcaacgcttatcggttcggtcctccagttagtgttacctaaccttcaacctgaccaagggtagatcacttggtttcgcgtctactccttccgactcgacgccctgttcagactcgctttcgcttcggctgcacatctcaagatgcttaaccttgccggaaaaagtaactcgtaggttcattatgcaaaaggcacgccgtcactgcttacgcagctccgaccgcttgtaggcgcacggtttcagggactatttcactcttctattcgaagtgcttttcacctttccttcacagtactggttcgctatcggtctctcgggagtatttagccttaccggatggtcccggcagattcacgcaagatttctcgtgtcccgcgctactcaggataccactacgcttaatttgacttcgtataccggactatcaccgtctatggttccactttccagaggattctactcgtcaaatgtcttgcgacatcgtggtcctacaaccccacacatgccgtaacatgggtggtttgggctattccccgttcgctcgccactactaggggaatcattattattttcttttcctacaggtactaagatgtttcagttccctgcgttagcttccatcaaagatggatgacattccttcagaatgccgggttgtcccattcggaaatctctggatcaaaggttatttgcacctacccagagcttatcgcagcttatcacgtccttcatcgcctccgagagccaaggcatccgccatgcgcccttgcttactttctttcaaacttacctttaagtatcaggtatcaagtatcaggtattaaacccgggtactcaatatcgcggtacttaaaacgtacggttcgatatatacttttagctctttactaaattttactttttgtacatcatgtcaaagatcgtttctctgttttcagagatggtggagaataacggattcgaaccgttgaccctctgcgtgcaaggcagatgctctagccagctgagctaatcccccaagagtaattgaacatcgcaataatgtattggcaacgacaatttttgttcggagtagtcccaggcagagttgaactgccgacctctacattatcagtgtagcgctctaaccaactgagctataggactatgttctacgcattatcggctgctttcggcataatcgatgcaagcatcgcttctgctctctcttgctcgataattcaaccttgtctacctgatgttagactcggcttctttatttctcttgtttatctctatctatacttctatagatggttgatctatatgttataaataaacaagtaccagtagtacaataatagaacctatgaaatcgttgttacgacatcgctccagaaaggaggtgttccagccgcaccttccggtacggctaccttgttacgacttagccccaattaccagttttaccctaggacgctccttgcggttacgtacttcaggtacccccggctttcatggcttgacgggcggtgtgtacaaggcccgggaacgtattcaccgcgccatggctgatgcgcgattactagcgaatccagcttcacgaagtcgggttgcagacttcgatccgaactgagagaggcttttgggattagcatcctgtcaccaggtagctgccttctgtaccccccattgtaacacgtgtgtagccccggacgtaagggccgtgctgatttgacgtcatccccaccttcctcacatcttacgacggcagtctctctagagtcctcagcatgacctgttagtaactaaagataagggttgcgctcgttatggcacttaagccgacacctcacggcacgagctgacgacaaccatgcagcaccttcacatttgccttacggctatactgtttccaatatattcaaatgcaatttaagcccgggtaaggttcctcgcgtatcatcgaattaaaccacatgttcctccgcttgtgcgggcccccgtcaattcctttgagtttcaccgttgccggcgtactccccaggtggaatacttaatgctttcgcttggccgcttactgtatatcgcaaacagcgagtattcatcgtttactgtgtggactaccagggtatctaatcctgtttgatacccacactttcgagcatcagtgtcagttgcagtccagtgagctgccttcgcaatcggagttcttcgtgatatctaagcatttcaccgctacaccacgaattccgcccacctctactgtactcaagacagccagtatcaactgcaattttacggttgagccgcaaactttcacaactgacttaactgtccacctacgctccctttaaacccaataaatccggataacgctcggatcctccgtattaccgcggctgctggcacggagttagccgatccttattcatatggtacatacaaaattccacacgtggaaaactttattcccatataaaagaagtttacaacccatagggcagtcatccttcacgctacttggctggttcaggcctgcgcccattgaccaatattcctcactgctgcctcccgtaggagtttggaccgtgtctcagttccaatgtgggggaccttcctctcagaacccctatccatcgaaggtttggtgagccgttacctcaccaactgcctaatggaacgcatccccatcgataaccgaaattctttaataacaagaccatgcggtctaattataccatcgggtattaatctttctttcgaaaggctatccccgagttatcggcaggttggatacgtgttactcacccgtgcgccggtcgccatctccagtttgcaagcaaactgaaatgctgcccctcgacttgcatgtgttaagcctgtagctagcgttcatcctgagccaggatcaaactcttcattgtaaaagtattattagtcagcataaagctgatttttgctctgttcaggatgccgtacaatttattgacttcattaataccttacgtctcacacatattaatatatataagacaagtattgacggttctatttttttcttgtactacttgtattgtttatcaatatttcaaagaacttgctgctttcgttttaaaagcgggtgcaaaggtaagaggttttattttaactaccaaatgttttcggaagtttttttcgcttttctttttctatcgtttctcagactctcttagcgaaagggaaagaaggtaaagaagaaaaacaaaacgccttttctttgcgaatcggactgcaaagataagaacttttagctttatcttccaaactttatcggaagttttttttgttcttatggtcaagcagtactgcgcttttacactaagtcaatttaacaaggctttcttctcttggaaagcgggtgcaaaagtacgcccttttcaaatatactccaaacttaaatcactctttttttgaattatttttgaggatagaagctaaagtgttgaattataaggatgttgtagaacatgtttttctcggatacaggaggaaaggcggaaaggggtacaccttattatattcacacgcgcgttagaagggcgaggacacgggcgtatgcaccagggaaatgaagaggaaatacaggaaaggtgaagaagatgcgcaaaggaaaccagaacgggaatccaaagaaaaaggaaaaaaggacggaggaaaaggggattgaaagactgaaaaggaagaaggcaggaagaaggggaaatcgtagcaagggaggaaaatacgaaaaaaagggtagagacaggagtcttttaaagttctacactattggaaaaagaaaaaactctgccatccgcaacaattcgataaacattcttagggggactttttagtcaacccctacttacgtgtcagccaggctctctatgaaaataaaaaactataatttgctgtcatctgtcacggtgtcggatgtaattgcttgaatatgaataattaatgaggtgacagaagtaggtgacggcagtgtgacggcaaattttgctgtcacactgccgtgttgtcaatggttacttatgggctgttggttggtctatacagagctttttagtttctcccgcttgaaacttttgtttctcctgcttggaactaaagtttcatcggcttgaaactttagtttcaaagccgtgaaaacaaagtttcggacgcttgaaaacagtggttccagccgatggaatgaatgaaacaaggcaggaaactgatcccttacttatatgattcaattaacttgaccgcaccaactgttcgattaacctactcttccaagaaacaataaatcacttatcactcaaaaacagcggagttatcaactattaaaggatgatttatcaattattaatgtctgaaatatcaatcgttaagaattgacacctcagacattaacacactgtaaatcaaatgacaacatcaaacaaatgacagataatgatacatggaagagtgagagcaaacacttgctctcataactgctaccacaattgctgccatacctgaaactacgatgaataaaggcatacagacaatctgttagggcatgagagcaaaagtcgcgttgaattactattggttgcgtaagctgtttgagtttgcaattgattcttctgtcatttgttttagcaatccggttatgcttgattcggaatgaagcaacatattcggctaccgaatacaaagcagaaatctttgactcgcgctacagatacattcatcagacttttattgttttctatataaaaagcaaccaccttcgcccaatacacagtggaaataattaagaatccggcattccttccgtacgtgacaaatatagataattctaatctgatcgaaaatgacattagtattttttccatcttgcacacatatgtattacaggaaaaacttcttttcaatgcttacatgtttcgtctatatataaaatcactgttaaatcactccgcaatctcaaacaaaaaggtcatctgtctgttacatacccgacttgaatatagtaacctaaacttttaaattatggctagagaaagcgtaaaaatcttacaaggaaagctggatgtagaaagcttgatttcacagttgaatgcagcattgtctgaagaatggctggcatactaccagtattgggtaggcgcattggtagtagaaggcgctatgcgtgcagacgtacaaggcgagttcgaagaacatgcagaagaagaacgcagacatgcgcaactgcttgccgaccgcattatcgaactagaaggagtacccgtattggacccgaagaaatggttcgaactggcaagatgcaaatatgatgctccccaaggatttgattctgtaagtctgctaaaagataatgtagcttctgagcgttgcgcaatactgcgttatcaggaaattgctgactttaccaatggaaaagatttcactacctgcgacattgccaagcatatccttgctgaagaagaagagcatgaacaagatcttcaggattacctgactgacattgccagaatgaaaaaatcatttctcgacaagtaatttccgactcgtcagagaatgagcgaaaggcagtcttaaaaagagaatatcaaaacattctctcttcaagattgccttttttcacaaatatatgcgaaaacgcccccgaagtttatactcctttaaactccttttgaacaattttcgtcctgattggaataccgcatttcagttgattcctcctacctttgcaaccacacttaatcataaagtgcatagaaaacaggtataaagagtataaaaagaaaagactatggcaaatcaattatcaagaactgatagttcatccaatcaggatatcagacaacgattcaacgtaaaaaaaacaatcatcggagttattgttttattaataggattatttcacttacctgaagcgatcctcctcattatggacggcatttctttagatagcatattgtatcttatcggcaatatattactctgtctgcttggcatataccaacttaaattccgttccagggaaatgagatatctgccgactaaaagcgtggtcaaagagaaaaactattctttcaatctgaaataccttgaaccattgaaagagatgatcgaatcaggcaatttttataacaatatcaatattgagaaaggaacaggcggaaatcttcggctggatgtcctcatgtcggctgacaagaaattcgcagcagtgagattgttacagtttatcccttacagctacattccggtcatggatatgcaatatctgcggaatgacaagatcgccgctctggagaatttcctggaacactctaaataagggtccgttttattttatccatccccacttttatgtaatagtgcgataaaaaccaaacaattttcaaacaaatcaagaagaaatctttcttttttcgtatttttgtcccaatatgcacgtttaattcaagtagacaacgaacatcaacgaaaaagaatgagagtaattgatttaatacataacagcgaaaaaacagctttctctttcgaaatccttcctccactgaaaggtacaggcatcgaaaagctgtatcagactgtcgatacccttcgggagtttgatccgaaatatatcaatatcaccacgcatcgcagcgaatacgtatataaggatctgggcaacggacttttccagcgaaaccggctgagaagacgcccggggactgttgccgtagctgccgctatccagaacaagtataatataacggtggttccgcacatactgtgcagcggcttcacccgtgaagaaaccgaatatgtactgctcgacctgcaattcctcaatatcaccgatctgctggtacttcggggagataaggccaaacatgaatcagtattcactcccgagggcgacgggtaccatcatgctatcgagttgcaggaacaaatcaataacttcaataagggaatctttgtagacggctcggagatgaaagtaaccaacagtccgttctcctacggtgtggcttgctatccggagaagcacgaggaggctcccaacatcgaatccgatctcttctggctgaaaaagaaagtagaagcaggggcagaatatgctgtgacacagttattctacgacaataagaaatacttcgaatttgtagagcaagcgaaggcagcaggtatcaatgtgcctatcattccgggcatcaagccattcaagaagttgtctcaactcagtatggtgcccaagacattcaaagtagacttgccggaagatttggtcaaggaggttttgaaatgcaagaacgacaaggaagccgaacaggttggtatcgaatggtgcgtcgcccaatgcaaagagttaatggcacatggagtgccaagcatccacttctactccatcggagcagtggacagtatcaaagaagtggctaaaatcatttattgatatgtttttcagagacgtaatcggacaagaagaaatcaagcaacgactcattcaggaagtgagtgaagggcgcataccgcatgcccaactgatctgtggccccgaaggagtcggtaaaatgccgctggctatcgcttatgcccgctacatcagttgcaccaaccggggtgagacggatgcctgcggagtatgtccgtcgtgtgtgaaattcaacaaactggtacatccggacgtacatttcgtattccccatcgtgaaaagttctaaaggaaaacgggaagtgtgcgacgactatatcgccgactggagaccattcgttctgaagaatccgtacttcaacctgaatcactggctgagagaaatggatgccgagaatgcacaggccatcatctacgcaaaagagagcgatgaaatcctgaagaaactcagcctcaaatcgagcgaaggaggattcaagatcacgattctttggttgcccgaaaagatgcatccggtatgtgccaacaaattattgaaattgctcgaagagccacctgagaaaaccatcttcctgctcgtatcggaagctccggaaatgattctgcctaccattctgagccgtactcaacgcatgaacgtgcgaaaaatagacgagccggccatcgaccgcgtattgcagtccaaatacggtatccagcctgccgacagcctttccattgcccatctggcaaacgggaactttatcaaagcactggaaactattcatctgaatgaagagaatcagctcttcttcgacttatttgtcagcctgatgcgattgtcctatcagcggaaaatcagggaaatgaagctttggagcgaacaggttgccggcatgggacgtgaacgccagaagaactttctggaatactgccagcgcatgatccgcgaaaactttatattcaatctccatcagcgtgatctgacgtacatgacaatcaacgaacagaatttcgcctcgcgctttgctcctttcgtcaacgaaaggaacgtaatgggcatcatggatgaactaagcgaagcgcaactgcatatagaacaaaatgtaaatgccaagatggtattcttcgacttctcgctgaagatgatcgtactgttgaagcaataataaatatataaactatggaatataagcttcataatgggagcggcggtctttgctgcaaaggatgctcccgacaagataagaaactgaacacttacgattggctggcagacataccgggcaacgcggaagagtgtgatatggtggaagtgcaatttaaaaacacccgaaaaggctattaccgcaacagcaacaagatcaaactggaaaagggagacatcgttgccgtagaagctgctccgggccatgacatcggcgtcgtaaccctaaccggaagactcgtcccgctgcaaatgaagaaagccaacttcaagaccgatgcggaaataaagagaatctaccggaaagcgaaaccggtggatatggagaagttcaacgaagcgaaagcaaaggaacatgcgaccatgatccgtgcccgccagattgcgctgaacctgaatctggatatgaaaatcggtgatgtggaatatcagggcgacggcaacaaggctattttctactacattgctgacgagcgtgtggacttccgccaactgattaaggtacttgccgaagctttccgtgtccgcattgaaatgaaacaaatcggtgcacgacaggaagcaggacgtatcggaggtatcggtccttgcggacgggagctttgctgcgctacttggatgacgagctttgtatcggtatctacaagtgccgcccgctttcaggacatttcactgaatcctcaaaagcttgccggacagtgcgcaaagttaaagtgttgtctcaactatgaggtggactgctatgtggaagctcagaagcgcctcccttccaaagaaatcgaactggaaacaaaggacggcactttctacttcttcaaggctgatattctgagtaatcatgtttcttactctacggacaagaacttccccgccaatctggtaacaatcagtggaaaacgtgcctttgaggtaattgccatgaacaagaaaggaatgaaaccggatagtctgctcgaagctgaagtgaagcaagaatccaaaaagccgattgacttgctggaacaggaaagcctcacccgcttcgaccgtaaccgaaataataaggacggaaacaacggtaaccggaacaagaagaagagaaaaggaaataatgacaaccgcccgcaggcacaggccgaaggtggaaatcgtccgcagcaacctcagaggggggagaacgagaatcgtccccaaccgtcagagaacggcaacagaggagaaagaggagacagagaaaatcgtccgagaaacaataacaataataaccggaacagaggacagaatcaaggacggaataatgagaacagacgtccggaaagaggacagaatcaggaacgtccacagaatccgaaccgtccgcagaatcaagagcgtccgcagaatagagaacggcaactcaaacaggaacgtcctcaaaatcaggaacgcccgcaagaacaaggaagacaacccaaccaggaacgtattcccagacctgaaagaaattcgaatcaagagaaaccgcaaaataatgaaaagcctgctcaggaatagcttattttgtttattcggtgcctgcctcatggcagcctgtaatgaaaataccgtgtatcactcctaccagtccctgcccaatgagggatggggaaagagtgatacactctcttttcagtgtcctgttacggacagtattcctggtacactcagattatttgcggaagttcgcaacagaagtgaatacccttaccgcaacctttacttattcattcatgagaatctgctcgactccacagtatggcgcactgacacgatagcggtcaacctggctgattccacaggaagatggacaggcaatgggtggggaagtatctatcaaacagcagtttttatcaaatctgtccgcccgctgcatcccggaaactacacagttaagattgtgcacggaatgcaggatgagaagttaaccggactcaatgacgtcggtatccggattgaaaaacaagaagaatagattaaagccttctgcctcttccggcatccagcctcaggaagataaacaataaaatggtgaatccccacaaggaagaacctccgtaactgaagaacggcaaaggaataccaattaccggagtcagcccaagcaccatcccgacattaataaaaagatggaaaaggaaaatactgacaacggaatatccatagacacgtgcaaaagtggaagtctgccgctcggataaagcaatcagtctcagaatcaatataaggaaagccaacagaacagcagccgaaccgacaaatccctgctcctctcccactgtgcagaagataaagtcagtatcttgttcgggcacatatttcagtttcgtctgtgtgccattcagaaagccttttccggtcaatccaccggaaccgatggctatctttgactgattgacattatatcctgctcccgtcaggtcttcttccataccgagtacaaccttgatacggatttgctgatgggattccaagatgttatcaaatacgtagttactggaatacagaaagccgatagagccgatggcaaacagggcaatcaggaaataggaacgttgacgctctctcaatgccagatagagcagataacctaccacaagaacacaaagcccccattgcacccataccagactgaagtgtattccgtattccgatattaaatatgcgataagcagaatgatcaggcttcctccgataatgttccgtgtgggttcccactttttggggtacacccataccattcctccggcaaacaacagaatcaataacaacacgataaattcgcccaacggtgtgggagtatcggcaataaagacctcgtcaaaacggatgccgacaacaaagtaaatcactgcacacaaaccggcaaaaagcactacaccgggcattccttcccgataaagcaccaaaaagaaggcaagatagactaatgctgaccccgtctcccgctgtccgataatcaggagcatcggaagaagaatgataaagcccaagacgaaggcacacttttctttctttatgctgaatgagtatgagttcatatatttcgccagcgccagtgccgtagcaaacttggcaaactcggcgggttgcaggctgaccggtcccatcaccagccaagaacgcgatcctttcgtatccggtgcgataaagatggtaacaataagcagcacaatcatccctacatatataatgtacgcgaacatatcatacatccggtcttccagcatcagcaaaacaaatcccaaaccaaaggagcagataatccatacaaactgctttccggcacgggtagagaaatcaaagaagtcacgatcgccatagtcatagctggcaccgcaaacgctgaaccatccgccgacaatcaaaagcagatagataccaatcgttacccaatccagtgttttccacaaactatcgttcctcgttaccatataagatgattctgttactgatttcttctgctcttaactcattctcgggcgacaacttccctttcatatattgttccatcatcaatgcaccgatcggcactccataagtcgctccccaacctccattctctacatatacggcaatggcgatcttaggctggttcatcggagcaaagcccataaacaccgaatggtcatgtccgcgattctgcgctgttcctgtctttccgcaggcttcaagttccggcaccatcacggacagcatacggcaagtacctccggtggcagcagcacgcattccttctaccacagattcataatgtcttcgctctatggttgtgttgcgtggatgtcgataaatgctatccaactgcgcatcctgaatttccttcacaatatgtggtgttgtaaaatgtccgcgattggcaatcgttgcccctaagttagctatctgaagaggggtagacagaatttcaccttgtccgatggagatactgatgaccgtcagtccgttccagtgtccacgataagccttgtcataaaattgcgcgttcggtatcaagccccgtttctctccgggcaaatcaactcctaacttatagccgaatccctgagaaaccatgtgatctttccaaactgtgatggcattctgcggtgaaccgtacttgcgatcgccgaacatacggaacagcccccaacagaaataggagttgcaagaagtcgcaatagccggaatcaatggcaaaggtgagccgtgagcatgacatcccactgtcagacgcccataatggaaaccacgagaacaggggaaagaaggactttgctcggtaatgattccttcttgcaggaaggtcagtccctgtgccgtcttgaaagttgaccccggaggatagactcccatcaacgcacgattgagcaacggtttctgtttatcgcgttgcagcatcagatggttcttgccacgctgacgaccaatcatcagatgcggatcataattcggagaagaaaccagacaaaggatttctccggtttccggttcgatagctacgatacttccaatcttatttttcaataaccgttcgcctaatatctgcaaatcgatgtcgagactcagagtcagattcttgcccggaatggaaggacggtcatactctccgtccatataacgtccctggatacgtccatgcgcatcgcgcaacagaatctctactcccttttctccacgcaggtatttctcgtacgatctttcaactcccagttttcctacataatctccgcggatgtagtatccctcttcatccgcctccatatctttaacggatacctcaccgatatcccccaaagcatgggcggcagcattgtatgaatattgccggatcgtacgccgctgaatataaaaaccgggaaacttgaacagtttctcctggaagacaccgcactcctccgcagagagttgtgacatgaacagctggttggtatatcgggaatatcccggattgcggcggcggtctctcatatcactcatgatcttaaggaactgagcacgagtaatgcccaacgactcacataaatcgagtgtatccagattttcgacctctttcgggacaagagtgatgtcataggccggctggttgaataccagcagtttgccgttacggtcgtaaatagcaccccgtgagggatattgaattttattcaggaaagcattgctgtcggcattcttcttgtagtcgtctgtcgttatctgcaatacaaagaggcgtatcagataaatcaacacaatagttaaagcaatccccccgataacaaatttccgcttttctaatctatagtcttttgccattcctatctccttattccttctacagcaagaatgcaggttaaagtcagaagggtgcacgaaatcacccgcaataacaacagccagatgctggtaaatgagaagaactcaatgctgagtaatgccaggctatggacaaaaacacttgccgtggtatatttcaggaaaggagtgatgcccatgctcttgaaagaagggatgatactgtccagattgtcacgcggagtaaacaggcgcagcaaggacggacgaaggaaagccagcagcacggttgccgcagcattcatccccggagtatcggcaaagatatcaatggttagtccgaagaagaaagcccacaacatcaactcattccgggaagttccggaagcgaatttcagtataaagtaaatgtagagaaagggagtagcatatccggcaatatgtacgttattcaggatcagcacctgaagaagtaccagcccgataaaccatccgattctatgtatataggtaattatcattatttcacagccttattttccagttctttctgttcctgctgaccgttccgggctatcacccgcacatcactcaccttgccgaaatcggtagccaacttgattttcaacaaataagacaatccgtcgtgcgagtcggacatatcatcgactgttcctaccatgattccttcagggaatacggtagagaagccgcttgtcaccaccgtatcacccagattaaactctgcatgacgaggcaaatctttcagatacgcatagcgggaatctccatgctcccacttcagataaccaaagtagtcacttccgacaatcttgcaactaatatttgacttgctgttcaataccgaaatcacgagtgaatacgaagaggaggtttcatagacaatacccacaattccgtttccgtccaccactcccatttcgggacggatgccggcagaagaaccctgatcgagcgttatataattatccgcctgattcagactgttcttaatgacgtgtgccttgaacaactgataatctgtcagaggtatctccttgatgctgtttacagtaaccgaatcaacctgatgctcccgcaacgccttttccagattagtgatctgctgttcgagcgccatattacgatccagcaagtctgcgttgaccgatttgagatggaaataagagcttattcctcccgaaacttcataaactgcccccacaacgacattggcagatgtaaagaaagtactctgctggtagttgttgaaccgaaataacaaaacaaaactggctacctctaatacgatgaagaggaaccagtaattgtatttcaaaaggaagtttattaaattccgcatgaataatgatccgtattatttatctcatcaagaaagagaaacggtctacattctttaatgccacacccgtacctttggctactgcgtgcaaaggatcttcagcaatgtggaaaggtatgttaattttatctgtcaaacgcttgtccagtccgcgaagcaatgcaccaccaccggcaagataaatgccgttgtgtacaatatccgcatacagttcgggcggcgtattttccaatgcactcaggatggctgtttcaaccttggagatggatttctccagacagtgagccacttcctgataacatacgggcacttccatcggaagagctgtaatacggttcggtccatgaacgatgtaatcttccggagcgtcatcgccaagctcggtcagtgcagcacctacgttgatcttaatacgttctgccatacgttcgctgactttcacattatgctgacggctcatgtactcctggatatccgcagtcagatcatcaccggcgatacggatagagttgttggaaacgatacctcccaaagagataacggcaatttccgtagacccaccacctatatccacgatcatgtttccttcgggcgcttctacatcaataccgataccgatcgccgcagccatcggttcgaatatcagatagacgtcacgcccaccggcatgctcggccgagtcacgaacggcacggagttctacttccgtacttcccgacggcacaccgatcaccatacgaagtgacggcgaaaacaagtgattacgagtatttacctgtttaatcaaaccgcgcatcatttgctcacaagcatagaagtcggcgatcactccatccctcaacggacgaatagtacgtatattttcgtgggttttttcgtgcatcaacttcgccttttccccaacggcgatcatcttatctgtacggcgatccaaggccacaaccgaaggctcatccaccacaattttcccgtttgtgatgatgatggtattggctgtccccaagtccatcgctatttcttgtgtaaaagagaataatcccattaatataaagtattaagtattaagtattaggtataaagtatcaggtataaagtagactgccttatccgcaaggttaatacttaatacctaatacttaatgcctgtttttaatgtttaaaatgacggataccggtggtcaccatcgccataccgtgctcgttgcagtaagcaaaagtaagatcgtctttcaccgagccgcccggctggatgactgccgtaataccttctttgtctgctatttccacgcaatccgggaaggggaagaaagcatctgaagccattaccgcaccgttcagatcgaatccgaatgatttggctttttcaatcgcttgtttcaaggcgtctacccgtgaagtctgtcccacaccgcttgcaagaagctgtttgccttttgccagcacgatagcgtttgatttactgttcttaacgatcttgttggcaaacaacagatcttccacttcttccggagtaggagctttgtctgtcacagttctcagatcggcaaccgtttcaatattcatatctttgtcctgcaccaatacaccgttcaacaaagcacggaactgtttcttaggcagtttggcttctttgcgaaccaggatgatacggttctttttctgtcccagaatctcgagcgcgtctacgtcatagtccggcgcgataatcacttcgaagaatatcttgttaatctcttcagctgctgctttatcaatcactccgttagtaatcaacacgcctccgaaagcggaaacgggatcaccggccaacgcgtctgtccatgcttccagtacagttggacgagaagccaggccacaagcattattatgtttcaggatagcgaaagtcaaatcttcgtattcgtcgatcagatcgacggcagcattgatgtccagcaagttgttataagagatttccttaccgtgaatctgatcgaacatggcgtccagatttccgtagaaataacctttctgatgagggttttcaccgtaacggagttgcttctggttgtttaccgaacaacggaaagcagaaccttcgccggcatcgaaataattgaagatagctgagtcgtagtgagaagaaacggcaaacgcttcttttgccatccagcgacgttcttcgagtgaagaagtagcgccatgttccatcagcatatccagcaatggcttatattgtgcctgagaagccacgatgatgacatcgttatagttcttggcagcagcacgaatcaaagagattccacctatatcgattttttcaatgatgtctgcttcggatgcgccggaagccacggtagcttcaaacggatacaggtcgacaataaccaaatctatttcggggatttcatacttttcaatctgttgaatatcctgttccaggtcacgacggcaaaggatacctccaaaaatcttcggatgtaatgtcttcactctaccaccaaggattgaaggataagtggtcaaatcttccactgccttacaaggatatcctagtgattcaataaactgacgagttccacctgttgagagaaactcgactccttcttcgtaaagtttggtaataatttcgtccaaaccttccttatggtatacagataccaatgcagtttttattcttttagactctgacattgaattgcttattaagtatttgatgcgcaaagttacgaaatattgtttatcgtacgtaataaataaggtgtgaattaataaaaaaaagcgttgactgttcctgttggaaagtcaacgctccttcgcatatatagtttctaatcaaaatctattaccagatagacactcgtttgtccttcgctacgaacataggatcatgttctgtgatattgaatgcttcgtaccagttctggatatgaggcaatgctccgtccacacgccattttcctaaagagtgaggatcgagtttggtcagtcggagaatctcttccggacggatgtgtcctgcccatacattagcataagcgaggaagaaacgttgttcgggagtgaatccgtcaacaacttccagcggtgctgtttccattgctttcttgaaagctgcgaaagaaacctgcaagccaccgtggtcggcaatgttctctcccaaagtaagttcaccgtttgcatgcacaccgggagccacttctatgctgtcaaagaagttaaccatcacttgagcacgttcctcgaactttttagcatcttcttctgtccaccagtctttcaggttaccatccttgtcgtattgacggccctgatcgtcgaatccgtgagtcatttcatggccgataaccacaccgatagcaccatagttcatcgcatcgtcagcgttcatatcaaagaacggagcctgcaggatagcggctgggaaacagatttcgttggttgtcgggttatagtaagcgttcaccgtctgaggtgtcatcaaccattcgtccttgtcgaccggcttaccggctttcgcgatcatgtcattgaaatcccattggctggcacgctcgatatttgcccaataagagtcgtctttgatctccagagcagagtaatctttccatttatccgggtaaccgatctttacatggaaagtagccagtttctctaatgctttcacctttgtcggttcgctcatccattccagcgctttgatacgttcgcccagagaagtctgcaggttcttcaccaatccaaccatacgttctttggcagcggcagggaagtatttttcgacatacatctgtcctactacttcacccaaagagccgtctacagtgcttactgcacgtttccaacgaggctgcatttctttcttgccggacattgttctgctatagaagtcgaagttttgtgccacgaaatcatcactgaggaaagaggctgcggcatcgatcagattccattgaagatagaacttctgatcttcaagaggcactgtattaataacatcggcaacttccttcatggctgcaggctgaccgacattcacttctttcaagtcattcagtcccgaagtagtgaagtaagcatcccagttaaaagtagggaagttctttttcagcgtttccatgtccatcttattatagttggcatgaggatcacgcaattctacttgtgaacgggcagccttggcaagacgtgtttcgatgttcatcacagccaccattgctttctgtgcggtagcttcgtcatagccagccaactggaacattttaacgaggtgttccttatatttatcgcggatactctttgtctgctcgtcattctccagatagtagtcacgctgtcccattccgagaccgccctgataggtctgaaccatgttcatagagctgttcatatcatccgcactaacaaacatagtaaagtaaggacgtattcctttcttctgactttcggcaatgtaggtgtaaatctcttctttatctttgagcgcatcgatagccgccatttcttctttgatcggagctgctccttctttgttcagcttcacgctatccatagcgatgttataaagatcacccactttctgggcagcactgcccggagcgttgtctttctttgcagccagttcggcaatcagttctttcaactgttcgcggcttttctcgtgaagcatatcgaaagagccgaagcgtgaatactcgtctgtcagcggatgactttcaatccatccaccgcaggcatactgataaaaacttgtacccggcattgccgtggtatccagattagcaaggtcgataccggacgttagtacggcctctttcttgctattacatcctgttgtcataaggcatacggcaagaattggtaaatacttggttactttcatattatataataaattagtttttcacttcttccagttccatcgaaacccgttcccactcttcaacggtggtatccaattgctgtttcagcttctgatgccgttcatacagttgcatatccgatgctccttccggggttgccatctttgcttccagaatggcgattgccgattccgtttcttcaatcgaagcctcacagtccgccacctggcgttccaacttctttatcttcttattgagttccttctgcgcttcatacgagagtctgttctccgaaggttgctctgtatccgcttcgtttcctttggcagatgtggtaggagaagtagagagagaaactcctttctgaagttcattcaggctgtcgatcttcttcttttgcaggaaatcgtagataccgccaagatgttctttcactgttccaccaccgaactcatatactttagtcgcaagtccgtccaaaaaatcacggtcgtggctgacaagtatcactgttccgtcaaattcgcggatagcttctttcagtacatctttggaacgcatatccagatgattggtaggttcgtccaaaatcaggaagttcaccggttccagcagcaacttaatcatagccagacgagtacgctctccaccggaaagtactttcacttttttatccgaagcctctccgccaaacatgaatgcacccaaaatgtcacgtatcttcaaccgaatatctcctgtcgccacacggtcgatcgtatcaaataccgtcatgttttcatccagcatctgcgcctgattctgtgcaaagtaaccgatctgcacgttatgcccgatcgtcagtttaccatcaaaatcaatctcgcccatgatacatttcactaacgtagatttaccttctccgttctttccgacaaatgcgactttttctcctctgttgatcgtcagattcacatcatggaaaacaacgtgctgtccgtatgccttgcgtacgtcttcacagataaccggataattcccgctacggctagcaggaggaaatttcagacggagggaagagttgtcttcctcatcgacctcgatacggtctatcttttccagttgtttgatacgactctgcacctgtacggctttggttgccttatagcggaaacgttcgataaagtcttccgtatcctgtatctgcttctgctgattctcataggcacggagctgctgctcacgacgttctttacgtaatacgacaaactcatcgtacttcactttatagtcataaatctgaccgcaggtaatctcgatcgtacgggtagttacattattaaggaaagcacggtcgtggctgaccagcacaacagcattggcacgggtagacaggaagttctccagccattgtatactctcgatatccagatggttagtcggctcatcaaggagcagcacatccggacgacggagcaagagcttcgctagttcgatacgcatacgccagccgccggagaattcggaagtcgaacggttaaagtcttccctgctaaagcccaatcccaacagggtacgttctatttccgcctgaaaattggttcctcccatcatcaggaagcggtcgttttcgtgtgtgaagcggtctattaactggtggtattcttcggattcatagtcggtgcggtcggcaagctgctgattcatccgttcaaggtttgcctgaagttcgaaaatatgctcgaaagcgagttctgcttcctccatcaccgtgcggacatccgaaaggatcatgacttgcggcagatagccgattgttacatctttagggacggctaccactccacgggtcgggttttgcagacctgccaatattttcaacatagtcgatttgcccgcaccattcttgccgactaaagcgatgcggtcttttttattgataacatagctgacatccgcaaagagcggtgtcgcattaaattctactgataatccttctactgaaatcacgtctgtctctgatttataagattttggattgcaaagataatgaataattattggataaagggcagtattatccgttatgaaagacaaaaaaagcagtcattctcatgaatgactgcttcctggtctttatcaaaagcttttctttagaacaatttagcagggtattcaccggcatctaccaatgcctgaatcttatccactacgctctgacggtcttccggataagttacaccaaaccatttgctggtagtatctagaacttctacagttgcagttccgtcgttaatcaatttatccaccatcagcgggataaagaattcgctcttcaggttctccatgttcttcggatcgctcaggaaagtcttgaagaactcttcactgtaagcaaagtagtcgggagtaaagccccagaagttcatacttaccggagtcgtatcaggagtagctgtccattcaccgttatcatcgatgtattttacttcgccgtccagacgttgaatcttcgtacgttccactacggaagtcagcaagttgttagcatctgtactgcagataccacgagataccgtaccgctctcgctcaacgtatttcccacacggaaacctaccattgaataaacattcttggaattttcgggaagagcagacaggaatttgcccattacctggaacgagtcacgaccatagaagtcatcgcagttgattaccgcaaacggttcactaatcacatcagctcccatcattaccgcatgatttgtaccccatggttttgtacggtctgccggacaagtgaatccttccggaagatcatcaatagactggaataccagttcgcaaggaatgtggccttcgtatttagaaataatcttttcgcggaaatcctgttcaaaatctttgcggattacaaatacaagcttaccaaatcctgcgttgatagcatcatagatagagtaatccataatagtttcgccgttaggacccagtccgtccaattgcttcaagcctccataacggctacccataccagcagccaataagaataaagttggtttcataaattgtgtaatattaaaaggttagtgatgtcaatggcatcagatttcgttgcaaatttacaaaaatagttgaatccaacaggacaaatatcaatcattattcactaaaatcgtacaaaaatcattcattagaacgggtaaccgatagcaaaatgtattcccagattcttgaagaaagctccggttacattataatagccgctacgttccgtatcataaggcagatgcagaggaataccgaagtcgagacggaatacgagaatatccatgtcataacggataccgacacccgttcccaaagctatttgtttagggaaagtcttcagacgcagttgtgaattgggacgtgcttcttttccatcagccaaaagctttctgtctttgcgcaacaaccacacatttcctgcatccagaaaggtagctccccaaaagctcttgaaaatacggaaacgatattccacattcgcctcaaagcggaaggttcctgtctgatccaggtaggaatattttccctcttccggatgataaccgcccggaccgacactgcgcactgtaaaagcacggatactattggcaccacctacataaaattgttcactatagggagctatcgtagcattgccataagtaaacagtgcacctactgccatgcggctggctatcgcattattcttatctatgttccacaaatgacgcaactctgtattcaacttcacaaactgtgcaaacggagcccccagcaaactcttatcctcttcattgaacggcttgccaaaagcacggtaaataagggaagtgatattacccgccgaagtgacggtagactgccaccagatagggttctttatccgacgacccgaagcattgtcatacgtatacgtatattccatcgccggaataaactggttcctaagactgacatacaatgcaggattagcttcagctatctctttaaaatcctcagactgatgctgcaagacattaaatgtcagtttaaaaggagtaatactatgccggctggtacgggagggctggaaatcgtatgtagcattgccgccaaaggacagcagtttataatactttgcccggttcagctggttgatatacagacgaaaggtcgtcgtggccgggaagtcaaactcccgtttacccagatgcgggaacacgactctcggaaaagtcagagaggtagaaagccccatttcccaactgttcatcagtgagctcttctcaccgcctccggtctgccactcataagagcctttcagttttacgttccagctttcaccacctccgaatacattgttacgagtgacaccgaaagatgcaccgggaccagtctggtcattactcttcgttactacattcagttccagttctgcatccaacggtttggcaaatgtagcctgcatagtgacatccagtgtatcacaagccgctgtcgtatctcggggagcatattgcatatccatatagctgaatataccgagctgactcaatttctcctgcacctgctcctgccggtactggctataaagacgggtacggttggaagccctcatctgtttgctccgtacaaactgctgatagttcatccatcgatagagcatattcggacggacctgcagtttatcataatagtgaatattcagattcttgtacaagatactgtcattaggtgcctcgccattctttccgaagagatagaccgaagcatctcctacatagtaagaacgttgagcggcagccggtaatcccggaagaggaatcagacgaagactgatatgtccgccgggaaccaaggttgtatctgcctgataggtcatatagtccggacggaagtagaaatatccccgattacgcaaaagggtactgatacgggaacgttcttcatccaaatccaccacattaaactgttcgccgggggtgatgtaagacatacgacgtccgcgttccatgatcttcagagtctggggagtgaaacgctgataatacactgtatcaatgaaataagggttcttcatatctaccgtatagagcagacttgctttcagactatctttcttatcgaccaaagtctcgtaagtcacctttccattgaaatatccgtaatcacggagcaggttagtggctaccttgacacgtacttcgggattgacagtagaaataaatacgggcggattggcggcaaagcggttaaacatccacttaccgaatcctttcttgtatttcacgaagtcgttatacatccacattttaaaaggaataggcagaaaacctcccaacagagtagtactgggagttttggcaagcgctgcattgatttccgtcaaagcagtttcaccaacccgtgtcgatgatttattgactatcaccgtttttcctccggtatagagtatttcatcttcgggcagatgtttcgtcaccgaacacgccgaaaacaacactattcctataagacagcctgctaatatgttaatacgtatatctttcattcttacttctttttcttaaagatgaacagttcactgagcttatccagtttcttgcgaagtaccagaccgactccggtttccgtaatctccccttcgagtacactctcatagttcttatcgtagaacaaacggacataacgggttcccgtacggtccagacgatattccaaagagatgttgtcaatgaaggattcggcatcattcgtcgcattttcgcccgtcgataccttaccgccgattacaatctggaagcggttattgaagaggcgctgcgaataacggaaactgtaatccgtacgcttgccgccggtatccgaggcgtcatgatcttcgacacccacagagacgctggcattcttcaggttacccatcagtgaatttatctgactgctcagtacggagttcagggcagaacccatattcagcttgccaagtccgccgcctccaccgccgatcggtccggtgccgagataggttttcatcaacatgatataaagtgcctgttttccacgttcttccgctcccattgctgtcagttcattctgtatggtcgcatcttccggggccgctacgtcgaaagcaaaagacaggttgtccaaccggttctttacgacaatggaaacgtcaaagttaaccattctcgttcctccgttctctccttcggatacggaagcacggatacggtcagttgccttgaagttcagcatggggtccatcgggtttccggtccaatctacatagctgccgttatcgatggcaaattccttgactgcaatgataggcagagaatacttcatcagtccaccgctcagtgtgtaacgtccggtcaatgtcaggtctccctgcggagtgtatttcatcgaaagatcgccacctccttccagttcgatacgattgtcactggcgtccaagtccactttcaccctgactgaagggtcgatatgaaccatcatcagcatatccaatccacctaaagatacggtaggcacttcctgacggacaactgtggtggtatcactgaatgaagtaaatgtcaccagacttcccaaacgatcctgcacggtcagcggtgaatcggtcagtacatacgagacatccgtattgcccagcagattcaggtttccacgcatattcaacccgtccaacgggccttttatggttgcccgcaagtccgcaaagacttttccgtagacaaggctttcgcgagtacgcttcgcattcaacaaggtatagttttccgccagcagattcagactcgccatcggtcgggacatatcacggaaatcgacataaccgtcgatcgtaaacggattctttcccgtggtgtaaatggcgaacttatcaaatatcagacgattgttcttcaactgcacagggcggttatcaaacaggaagttagcaccatactggcgtgacaggacagatacgctgtccagtatcagttcaccgtttatcaatggctgctcggtactgcctgttatattcaggtcaccgtccatatcaccggcaagcgtaaccagctcgtcgggaataaaggcgttggcaatacgaagcgggaagtgttccaacgtcgtatttacttccaggctatcctttcccgtcgaggtagggagcagcttgccatctgctatcagcacttctaccttatcatgattcagataagcgttgaggtattgttttccctgttcgcccggcagccatgtagcccccaaagtaatatcaccaatgcgctggcgttcataagtcagttcatcaatggatgcttccgcagagagctgaaggtctttttcggtctgtatatagtgtgcttctgccgagaacaatccggtgatttcggggaagtaaggcagtacgctcgttatttcatccaagcggattctccggatttcgacatcgatattctgcaaagaaaccgtatctccctgtaccgaatgcacacggaagcccataccttcatcatcccacatatccacattggcatacacgcgcatattcttatgcagataaatccagttatgatcttcgttgaagtggaatttacggaacgcaataatcggttcttccggaatcagtgtaaaagccagtccatccccttttccacgtcctccaaccagcggacgggcattgactccaagcaacacaccggttttccccttttcgttcttatattctgccagcagctcggcatcgcggtcgcgaatctcgcctgtcagaatagtggagaaggaaaactggggattcttcggtccgttgattactccggcacggagattcatacgggtagtatcctgtttgacggtgaaaaagaccgtatccagttgcaaggtatccactttcaaagcatggatggctgctttgccgttgattccccaatcgggagcagtgccgaatttcatggaagcatcatggaacgatatattcttcattgccatatagtatgccaacggattctcctttcctgccgaaaaagagaaaatagccgacggtaatgcttcacgcaaagcagcatgatccaagagtttttcatccacctgcttcatcaacacatctacaaaatgggtagactgacgaatcagaggatatacaccggcacgggcactcagattcagtttcatatcaccggcggtgaaatgagtgaaaacacggttctgccgtgcctctccgcttaaattgaatgccaacggatgtttcatcggcttgggcataagtcccagttcgtacaaatcaagctgagtaacgtcaactgtcactttaccgtccggatagctatgagctaaattatattctgcatccgccgtcattttcaaaagttcattgtcactcgtaagctgagccgttgccaaagcacctttaagatttcccgtcagatgaacattcgaaagatgatagcgggcgtaatgaagctggtccaaagaaagattcagattggctaaagaatggaaggacatgacatccagtcccctgcccttggcatctgccgaaagagatagttcataaatcgagtctttcgggagaaaatgatgcagttgcagatcgtttattttcagatcggccgtataaacttctgtcgaactgtttaatgcggcatttacattcatgctgcccttgccttctttcagatcgagttttgctttatactgcgggccgttcatctccatcttcatcttgagactcatactgtcgggaattactaaagagccatcgggtgtgactccagtcaatcctgtcaggaagttcagattccgggtaaccatatccagcccaatagttcccgaacgagtcagactgtccgtcaggttttcaaggattcctcccccctttagcgagaaagctcccggcaagtctaccgtgaagcgcgaaatctgcatctctttcagatttccatccgtaccggcacgaatcactaacggacggaacggatatgcttctttaaacgtttgaggcagtccgccggcaaaaagcatcacgtcctctttgcctatatatgcgttaaagctggcggataaacgtcctgtcgtcgggatatttacgagttcccaataagtctgggcggacaggtctatttctgaatgtggggtttgcagtttcagttcaggaatgcggatgatagaatcattcgaaaagagccgccctgtcagtgaagtaatactcagtcccgaacgctcttccatcgttatttcacgaatcacagcgttcatatttctgccttcgtagagcagagagtccaatccgatgcggatattccggactgccatatgagaggcgtcaaaaccttccgacggttggacctctccggtgtcataactggcagaggcacccgacaaaaggaattgcttcaatccataaaactggttctttaaatccgctttggcgtcatcaatggtcgcttcgcctatgtatgccgccatcttcatggagtcggcaggcagtttcataccgaatgatacattcttcaacttcagttgatgaaggttcaccttccagttcacaggagcagatgccgtcgtgtctttgggagtggtcgtggtatcagtcatcagaagttgtatatgagtatcggataactctgtccgattgacaactgccgtttcgttcgataaatcgactccatgactttgcagaaagaagcgccccaaaacgccttttatctgcatcccttctatcagattggcagaattgaccgccacctgacttaaggtaacctcgtcaacttctacttttcctttgagcaacggccatgcctgtacgcggacattcaggctttccaaagacaataaggtatccggctgctgtatgacttccacccctcgtaccagcagattaagcggaaaacgaaggtctatccgttccacctgaatctgcattccggttgctttagaagcatacgcagtaacctcccgtcgcaaaagattctgaacaggaggtatataaagtaataccatcagtattacaaaaagtattataggagtaagcaatatccagcccacccgtcttatccattttcgtttcatgcaggatgtgtcagtgtaaaagtgatacaaagtaaacaaattactttgaaaaaaggtttgtccaaaagctaaaatgtgaaaaagccggaggttatggttgcatttagcgcaatttcatcccgttcattccgttcattcggaaggtgagatatttgtcaaggcagcaccttctcactatgctacgagcttatgcccgtgccactacgttggcacgcttgtgccaccgcagtggcacgactgtgacatgcctttggcacaactgtgccaacagggtggcacaagcatggcactatataggctgttccaaaggagctgccgagagagatttaatgtaaaccgaaactatactcctcagcagcacgaacaactttacgcaccgcctccaaagtctccaacgtagtcttttctatttcttcggagaattcttccccccggcaagactccagccatcttaatgaagcaacagactcagaagctccgatcaaggtgaaaagcggaaggagtttatgagccatagcggctattccatccacctccctgtcagttaatgcctgttgcatccggtcggcattcttaccggtctcttcgataaaagtccggataatagaacacgccgcttccggatcatcttccgagaaggcagtcagtgcagaaaagttgaataaagtatcttcaggcagcgcatctgcaatcaattgcatatcatgtgttatatgcgcctcatcagctgacatttgtccttcattcagagttaccagcaattctttcaccgtaaaaggtttgtgcaggcatccggcaaagccgtgttcatgcaaagccttctcatccatttcgctgcgtgccgtgacagcaatgacaggaatattgcgggcttgcggaatgttagaggcacgcaataatttgaccagatcaaaaccgttgatagcaggcatctgtatatcggtcagcagcacatcaaacgtcgaggagcgcagttgctctatcagttcttccaactgctcgcagcaaacagcatcgatgttgtgctgtttcagcatggcagcagtcaggttcagctgaatcttatcatcatcaatcagaagcacacggatcaccttcatgaccggtacagcatctgtctcttccggagaaacatctgtttcttccggagaagcatccgtatctttcgacgctttcttgattctgctcccgaaaggtttattttccactattgacttgcccaccggaaagagtggcaacacgacagtaaagcaacttccttttcctaacgtgctttgtacatcgatcgtaccttcaagcagaagaaccagcttatgcacaatggacaatcccagtccgaatccttcttctccctgcgcaccggggaggcgggtaaattcctggaagatgcgttcccgatcttccgatgccatccctttgccggtatcctcaaccgctattgtcagcttcgaagcgttataaccaacagttaatgtgatcttgccctgctgagtgaatttcaccgcattggacaagagattattcactatctgctgaatacgtaaaggatcactgatatatttctccgacaattccggagcgatatgacattgcaagaccaagcctttagccgccgtcagaggttcaaagcaaacacggatttcttcaaacagctgagcaggattaaaaacaatccggttcacttccgctttattgaggtcaagacggtggaaatcaagcaagtcgcttactaacttcagtaaatgctctgaagaacttttcatgttgtccagatagaatcgctgccgttcatcttcggtcaggcgggacaagagttccgtatatcccattatcgagcctaatggcgccttaaagtcatgggtaatggcaagcatcagtttctcacgggcaacaagcaagtcttccgcccgcttattcgcttcttcgagctgacgccgataacggttgctacgagtaatatcccgcataattaagatcaggaaaaaggcggataagaatacggcaccaatggcaattccggcaatgatattagccgaacgcatccgcacctcttgctgaagttccgcatcctgacgggcacgcgcagacatttcctcctcgtatccttttatcagactatccattcttgcggtcagctgtgtattcatccgctgatacctcgtactggtacgccggatcgttcgcctccgctgcaaccgtttctcttcggtagccatgcgaatcttatgctgaagggagtccgccgacttgacaggttccaatatcgtatcggtggcaatttccagagaagtattgaccagcacggcagtatctttcttagaaggcgcgaacacttcccccaatcgtttgaagaagcctttcttcttcggggtagtgatcagagaatcgcgtttggtaataacccggtgttgtacccgttgctgagtaatcaccgagtcctgctgttctgatatgatttcttcaatctccgaggcggaaagcaagctatcattcgcctcgctcagcacccgcagcatctgaagggtattctgatctttctcatggagaagactcagcagactgtctgtccgcagattctgctgatcgtccgcagccgacagcgtctccatctcctgatgcacaaacaccagagaaaaaagaagaatcgccagcagcaatatatagccgatggttattttcagtttggtggagcgaaaggaagccataggcaattaagattttaaattatgaattttgaatggaaggcggtagtttcgtcttgtgatggaaacgccaccataacatcagaccggcactggtcaacccaaaaggaaatgccatccagacacctatgatcccccactccaacacgaatccgcaaaaatagccgaccggaagcgaaataaggaaataagcaatgaaggcaatcagcatcatcagttttacatctgagattccacgcaaggcattggcaaaggttatctgcaatccatctccaaactgatatacaaggaacggaaggataagcgaagttaccatagccgccacttcggtactatcggtaaaccaacctcccagataattgcggcagaggaatacgatggaagaaagcacaacacccaacgccatcatcaaatgaaaaccggcataagccgaacgacgtacattgagtatatcgccctgcccgttaaagttactcacacggacagccacagctgctcccatcccgtaatacatcataaacgtaaactgagaaatagccagcatgacctgatgagaagccagcgcaatggtacccagccagccaatcatcaccgcactcagactgaacgaagctgtctccattcccatctgaaaagcaatcggccaacccagcgaattcaatcgtccgaatatagccttcgaccatcccagacgatagaagccgagcttaaaacgaagaaaacgcggactccgcataaagactatgataaatacgactaccatcatgatacgcgagaacagcgtactgatacctgctcccagcaagcccatttccggcaagcccagctttccgtatatcaggatataattgccgataatattcagcacatttccgccgagcaatatccacatagcggtcttagtatccgtaattccatccgtaaactgcttgaagccattgaacagcatcacaaagacgagcgaagccagcagaaccagataataaggttttatcaggggaataagttcttccggctgtcccagatttcccacattaaaataaaggacagtcataccgatggtaagcaagaatgccaccaacaaatttgccagcaggctgttacgcaacgcctgccccgccgaagcatactgatgagttccatacaaacctcccacgataggagtcagcccgtacgagaagcctgtactgaaaataatcaccagattgaatacattattgacgaaggaagcagcacccagttctatcgtactatgatgaccgatcatcaacgtatcggcaaaccccagcacaataactcctatttgcccgattacaatgggcaatccgagagaaatcagtgctttgtaatgctccttatatatactatagatatttctcatttatttttccgtagttaatcgcatattccggcaactccgcatcctgccgttgcctccaataaatatccctccggtaaggagaagtcaggatatttgtttcttataataaagtatcactccattctccttcctgaaagcagactgagctaccttttgcaattgtccggcagtaacagcgcgataacgctctacctccttttccatatcttccgccctgcccaacagttcaaaccaagcaagattggtagcgacattcaaataattgatattgccgaatatctgcgtcgattcgaatttattcttcactttttccagttcctgttcgtcaacaggttcttgctgcaaacgttccagttcttcacgtacggccgcttccgcctgttccagcgaaacacctgccgcgggtttgcccgagatatggaacaatccggcatccacactaccggaaatataagcgtcgatactcgaaaacagttgtttttgctgtaccaggcgttgattcagacgactggaacgtccgttgctcaacaaatccgacaatatatcaaaagcgtaataatccggatgatcatgactgcacatatgatacgccatgaatagtgaatcaaggggtacgttacgctctactgtcaaccgtcgttcttctgtctgctccggttcctgcggcagattccgttgaggaacctccctgcgagggatgggaccgaaccatttttccgtcaatgcaactgcttcctcaaaagagatatttcccgttacggcgagcactgcattgttcggcgcataaaaacggaagaagaatgctttcacctcttccagcgtcgcattggctatgtgcgacaaatcttttccgatggtaggccactgataagtatgcgcccgatatgccagaggacgcaaaagatgaccgacgtctccgtaaggctggttcaggcaacgctgcttgaattcttccattactactccacgctgtacttccagactccgttcactgaaatcaaggctcagcatacggtcggattccagccaaaagccggtctctacattctgccggggtacagtgaggtagtaattggttatgtcattattggtccaggcattattctcgccgcctgccagttgcagcggcatatcataatcgggaatgttcaccgaacctccgaacatcaggtgttcgaacaaatgagcaaagcctgtatgctcgggatgttcgtcgcgggctcccacattatataatacattaagagctaccatctgcgtactttcgtcctgcgaatgtaccagacgtaacccattgtccaaaatatgcctgttaatcttcattctacttaatccagtacttctacttttacaatcttcacgtcctcttcggggcggtcgctacgatcggttttcacctgctgaatcttatccacgatgtccatgccttcgattacttcaccgaaaaccgtatactcaccgtccagatgaggagtacctcctacagtcgtataagcttcgatctgttccggcgtaaagtgaaattccggttgcttggcagcttccgcttccgcctctgcaaaaagcttctcctgcaattcatacaaaccgttttcatcgttttccttccgcatcttatagatttctttcatgtgcttctgagccaacgtattgaaaataacattgatcttattctcattcatctggctttccatgcccagcaatgtagagtcgttgtacactttgcctgtcacaatgtagaactggcaaccggatgattctttcttcggatttacattgtctccctgacgggcagcagacaaagcgccttttttgtgaaaatacttcggataaacaaattcggccggaagggtgtaacccacatctcctgcacccagcatctttcctttcggtgcattctttgaatccgggtcacctgcctgaatcataaagtctttgataacacggtggaacagcgttccttcataaacgccgtcttctgccagtttaatgaaattatcacgatgtttcggcgtctcattatacaacttaaccttgatgtctcccaaggttgtttcaatctttaccaacgtttcgttgtccatatttcctcctttttttgttccggttttgcaggccgtaagtccgcaaaacgatatggttaatagtaagtatgcaatctttttcataacacttttatttaatttaagtttgcaaatatactactttcgcccaaatcctcttacctttgtagcattaaaagaggcaaaagagagtatgatgaaatccatattgataatagaagacgatatcactttcggaatgatgctgaaaacctggctaagtaaaaaagggtttgaggtgtcgtcagtcagtaacattgcccgtgcccagaagcacattgaaggacaaggggcagacttaatcctgtccgatttacgcttaccggatcacgacggaatcgatcttctgaaatggatgaacgaaaaaggaatcgatattcctttgatcatcatgaccggttatgccgatatccaatcggcagtacaagcgatgaaactgggagcacgcgattatgttgccaaaccggtgaatccggaggaactactcaaaaagatgtcggaagctttgcaagcgaaagaagcgccgactacgcataccgcagccaaaacttctgcaaagaaaggttcttccgtttcgtccggaaacgccaccgaaacccatcatgcttatctggaaggagaaagtgatgccgccaagcaactctataattatgtaggtctagtagctcccaccaatatgtccgtactgatcaacggttccagcggaacgggaaaagagtatgtggcgcaccgcatccatcaactgagcaaacggaatgacaagccgtttatcgcggtagactgcggttcgatccccaaagaattagctgcatccgagtttttcggccatgtgaaaggctcttttacaggagcactgacggacaagaccggagcgttcgttgccgccaatggaggcactatcttcctggatgaaataggtaatctcagttacgaggtacagatacagcttcttcgtgccttgcaagagagaaagattcgtccggtcggttccacgcaagaagtttcggttgatatccgtctggtatccgccaccaacgagaatctggaacaggctatcgagaaagggactttccgtgaagaccttttccatcgtatcaatgaatttaccctgcggatgcccgacctaaaagaacggaaagaggatatccttttgtttgccaacttcttcctcgatcaggcaaacaaggaactggacaagcatctgatcggttttgactcgaaagcctcacaagccttactcaattatcactggccgggcaacttacgccaaatgaagaatatcgtaaaaagagcgaccttactggcacaaggcagtttcatcactcttcttgagttaggaaccgaattactggaaacaagtaccgtttgttccgcaagcatggcgctacgcaacgaagaaacagagaaagaacacattctggaggcattgcgccaaaccggaaataacaagagcaaagcggcacaattactgaatatcgaccggaagacattatataataagttgaaactatataatatcgacttgtaggttatcaatcagtactacccatatatttagaaggagatacgccgaactgctccatgaagtgcttgcgcaaagtacgggtatcggaataaccaaccatttccgaaatttcctgaatagaatagcgattctccagaatcaatgtcgccgccttgcttatacgtatactgcgaatcatatctataacagacaaatcactgcgctgtttcaccttccggtacaaggtaggctgactcatattcagttgctccgccaacatttttacattaaagtccgcattggaaaggttagcttctatgatatgaatcagttgttgcaagaaggcatcttctttctccccctcttccgattcctgtttcagcatcagggctttcgtataaatccgcttcaatcgctcacgctgcaaaatcaggttatccactttggtctttaatatctccggattaaagggtttcatcatataatcatccgctccgctattacagccttgcaggatgtcagcatcttctgctctggcagtcagtatcaaaataggaatatgcgcagtttcctgctgcatacgaatttccctgcaacaagcaaagccgtcctttacgggcatcatcacatccgagataataagatcgggcaactgttctttggctatccgcaccccttcctcaccattgcaggcttcactgactacatatctggaaatgaataagctccgaatatattcgcggacatcctcattatcttcgataatcagcagactttttttagccgctgtttcccgtgttttgttttccgttatcgaaagaaacgattccggtttcaattcttcattttgctttgtcttttcctgacggctgtcaataagttcataagaatcttttgcaaaatgcgctttgccttcgggaatataaagggcaaaggtacttccttcgtccggcacactcttcagcgttaccaagccatgatgcaagtccatcgtgttcttcacaatatgcagtccaattcctgccttcgttgacatctcaggtacattatctcccgttacgaacgattcaaaagcatatttctgcaaccattccggaatccctgcgcctgtatccgaaacggtgatccggcaataaccctgcccacttttcatcagatgagagacggaaagcaggacacgacctcccgatggggtatacttaaacgcatttgaaagaagattttgcacggccgaagcgatctttccctcatctacccaatacaggaacttcccttcgggcaaatcaacatcaaattgcaagcctttgatttcggccatctgccggaacggttccgacacattgcagaccagctgcaccaaatcaatctcggataactgaagtctgaccatcccggcccctatcttttgtacataaagcaactgatcgaccaaggtatgcagtgaggccgcattcttatacatgacctgcaatttcttataaaagtcttccaatggattgcactgtttcatcaattcctgtaacggggcaaggatcaaagtcagcggagtacgcagttcgtgggcaacgcccgtgaaaaagttctcgcgttccacacgtatctgacgttctttctcacgctccatactgaccgtcaacagttcatgtttcatctgcatttcgtgttccatccgtttctgccgtattctgatcaaccgtactccataagccactcctcccaacaataacagggaaacgaaaagccggaaagcaaaagtctgactccaatgaggaagaattacgatcttcagagaagtcaccgcccctgtctgaccgttcggatgtatattcttcacttcaaatacatactcaccggctgggaggttggtatacgaggctttctctccctcatcagaaatcagccaattcccctgataaggcaaaagccggtaattatatttttgttgttcgtccgagtaggacaggttattgaaagtcaaggagaaatctttgttatcattatccagtacaatgtgatccgtaaaagagatgacccgattgaggatgatctgattattaatcttttctccggtcccgacaggatggttatccacttccaaaccggttatcaacacccgtccgttggtcggataggcatttatatcctccggattgaaataagtcaggctctgattatttccgaagaacaaagtcttgtcactgaatacggcagagcggttactacctgctatgtagtaattgtaaaagagatgctgccgacgaccataccgcgatatgccggagttgcttcccaaccagatatgcccttcactgtcttccgctatgcagccgatgaagttactgcacagtccgtcattcgtggtataacgggcactgatcctgttttgttgtggagacaggatggcaaagccgtccgtataacctatatataaattcccatccgaggatgccagcagcgaacgtaccgaacgatattccatattcatcttccgctcatatccattttctacggagatacctccggaagcggattcaaccactctgcaaactcccatattgctggtccccagccatatcgttccatcttttgtctgagcaatcgcacggatgaaaggttgtcttttctcatttaaatagtgtgctgctgataatttggcgcatacacctgtctgacggttatacaataaaagcccgtctcccgtacctacatagagcctgttcttatcatccatatacaaagcccacaccgaagccctgttggcaacaccgtccaccaacagcgaatgggtcacgaaacgaccggtccggacatgataaacagtcaacgtaccatttatatttccaaaccacagattgccgtctacatctttcaaggcacacaacatcgtttcttccgatttcccgctacctgtatcgactttagagaaactaagttttttcccttttgcgtacggtatgtcacttcgcatgattcctttgtgataggtcgccaaccataaccgatgactatcatccatgaggatatcacatatttcgttatgcctgtcctgatagtaacggtcataaaactgtgacctcaaatcagaatacatcactcctccaccgttagtaccaatccaaagaaggccattaggatcgtaacaggcagaaatcatacgtgtttcgaggtttcggtaaatctgtgtatgtgtattgttatatatctccgacgtcagttcttccggctgcttttcatccggcatcaacagtgtatagccaccccatgtcactgccagatagcggttattgccgataaatatagtctgataaacatctgtatgagaaaggagattctcttttcctgtcccgccgtacgaaatccggtccatatgccccgacttcgtgtgataacggacaatgcctttggcgatggtagaaatccagacaactccgtctctgttcaagatggaagtgacttgtaatggttttccgtctgtcagcggtatcttctgatacgcctccggagtatccggatgaaacaggatcagattgccccggttagttgtcagccatattccgttcccggctttttcatgatagcacagagaagaaaagacttctcctttttcttccaataactgaaaggtcttttgtatgcgtacccgaacagccgttttttcttcttccttgccttgccgtatctcccattgacagagtatcagtctgtttcccgatattccccaaaaagaagaattgtcggcgggcaggacattaaatacacctatggcagtatctgattcagtatgtatcggaagaaaagtttcctgcttgcggttgaaataatagaggtatccatcggatacaattcctaaaaagtcatctgacagtcgcacaatggcagcaaccgaagcatacgtatccgcaggcttgaaattctgaatcgtttttccgtcataacggcttaatccgtcatccgtcccaaaccacataaatccgtcttcatccttatagatgcaaggaatcgtgttatccgccaatccatccctcattgtcagcagccgaatatctttatcaaaaaaagcataggcaggatgcagcgggcaacaactcagaatcaggataatcaggattagatttaagtgcttcattctattagataatttagggcaaataaacgaaattaagtcagaacatacaaaaaaacgaataaagaaatggacttatgaattaaacatgtatgttgaatgaaagaaacaggcatattcggaaccacattgtttgcgtacatttgcagccatacaacaacctgatgtacaccttttaaataatatacaatgaccttagtttatcttaacctgtcagacacaaaggagaaatttttatgataatacgcataccaaagactacatattatcataaatggttcatcggagctacactcgtcgttccggttcttccgcttaccgcccagacgtctccgaatcttgtattcatcatggcagaccagtatcggggggacgcactaggttgtttgggcaaagaacctgtaaagactccttgcctggatcatctggcttccgaaggagtcttattcactaatgcagtcagcagttatcctgtttcatcacccgcccgtgccatgctgatgacgggcatgtaccccctgcataataaagtaacaggcaactgcaattcacaaacagcgccttacggagtggagcttccacaggaggcccgctgttggagtgatgtactaaaagacatgaactaccgtacgggatacataggaaaatggcatctggattctccttacaaaccttatgtagacacttacaacaatcgcggcaaagtagcgtggaacgaatggtgtccgcccgaacgccgtcacggatttgaatactggacagcctacgggacatacgattatcatctgagaccgatgtattgggacacgactgccccacgtgacagtttctactacgtcaaccaatggggccctgcttatgaagcggataaagccatcgaatacatccagacacaaaaagagaataaacagcctttcgcactggtcgtatcgatgaatcctccgcataccggttacgaactggttcccgacaaatacaaagccatgtataaggacatagacgtggaagccctctgcgcccaccgccccgacatacctgccaaaggcaccgaaatgggaaactatttcagaaataacatacgcaattattacgcctgtatcacaggagtagacgaacaggtaggacgtatcatcgaaaccctcaaaagcaacggactttttgagaataccatcgttgtatttacttccgatcatggcatctgcatgggagctcacaacaatgccggaaaggatatcttctacgaagaatccatgcgcatccccatgattatttcatggccggcaaagataaagccacgcaaagatgaccatttaatgatcgccttcgccgacttatatccttccctcctttccctgatgggattccaaaaggaaatacccgaaacggtacagactttcgacttatcccgccatattctgggcaagagtaaaaaagaagtggtacagccttattattatgtacagtttgacaatcatgccaccggataccgcgggttacgtacgtcaacccacacattcgcagtccacgcaaccaatggaaaaatagacgaaacagttctttacgaccgaaccaaagacccatatcaaatggataatattgccggacaatccccccgtctggtccggcaattcaacaaacaactcaaggcatggctactccataccaacgattcatttgcccattatctcgaaaccgtaactaaataaacaccatgaagaaactttgctatctctctctttttatcctatactcagtttgcagcttcgcacaacaacaggctatccccgtccccaagccccatcaactcaaatggcatgaggcagaaatgggagctgtcttccattatgacctgcacgtgtttgacggcatccgctacggacaaggcaacaaccgtatcaatcccatcgaagattacaacatcttcaacccgaccgaactgaacactgaccaatggatacaagccgccaaagctgccggatgcaaatttgccgtactgactgctacccacgaaacaggtttcggactctggcaaagcgacgtcaacccttattgcctgaaagccgtgaaatggagagacgggaaaggagacattgtccgcgacttcgtcaactcctgccgcaaatatggtctgcaaccgggcatctatatcggtatccgatggaactccctgctgggcatccataacttcaaggccgaaggagaaggagcgttcgcccgcaaccgccaggcatggtacaagcgcctgtgcgagaaaatggtaacagaactctgcacccgctacggagatttatatatgatatggtttgacggcggagccgatgatccccgtgccgatggccccgacgtggaaccgattgtcaacaagtatcagccaaactgccttttctatcataacatcgaccgtgccgacttccgttggggaggttcggagacaggtacagtggaatatccctgctggtctacctttcccgtcccctgctcacaccataaacgcattgaaagcagtatcgaccagctcgaactgttaaaacacggtgataagaacggcaaatactgggtaccggcaatggcagacactccgctacggggagcaaacggccgccacgaatggttctgggaaccggatgacgagaacaacatctatccgctaaacacgctgatggacaaatatgaaaagtcagtaggaagaaacgccaccctcattctcggattaactcctgacccgaccggattaatccccgccggagacgcacagcgcctgaaagaaatgggagatgaaatcaatcggcggttctcctccccgatagcccgcatttcgggacaaaagaaaagcctgacactgaaacttggaaaggagcagtctgtcaattactgcatcatccaggaaaacatcaaaaacggagaacgcatccggcaatatcagatagaagccaaagtgaacggcaaatggcaaacagtctgcaaaggagaatctgtagggcacaaacggatcgaaaagtttgaaccggtagaagccacagcattaagactgaccgtatccgaatctgtcgcactgccggatattatcaacttcagcgcctattccgtaaaataacacaagaggtatgaaaagaataatccacatctgtttatggctattgacgggcatctttgcggaagtatcgctgtctgcacagaacccgtttatctaccataaagggaagacatacaaagatgttgcagcttatcggatggaagaaatcatcgacctgaacacccatactccatccacccccatcttatgcgaacaacaagtgccggaacaccaaagcactctttcgtataaagttgcacttcctttgtatgttcgtggtatattcttcagccgtgattcccgccccggcgactatcaatggccgaataacaccaatcggttgctcccctggatgttcaaccgtctcgaagacctcacacggagcgattatgcaggcattccttccaatgccctgccgtccgcatcgggcgatgcactgctcctcgaactcgcagacggagaatatctgttcgccaaagccattgcgggtagcaacagcctcagctggtttcaggttaatcaggacggcacgctcacgttgtatgtctccacactaggagaagatgcactgaccggccgactccccctcctgattttccggaaatcttcatccgtctaccatgtattcagtgacgcctacgattcgttaatcgcaaagaaagccgtatctgccctccgcaaaagagcggacaaagagtatttcaatgcctttgactatctgggatggtgtacttgggaacattatcattatgacattgatgaaacgaaaatactgaacgatatcgatgccatcgaagcatccggcataccggtacgttacgtattaattgacgacggacacatagcgaacaagaaccggcaactgaccagtctcgtccccgacaaaaaacgttttccgaacggatggagccgcatcatgaagcgcaaacaagcagataaaatccgatggatagggctatggtacagcctttccggctattggatgggaatctctgccgagaatgactttccgccggaaatccggcaagttctacactcctacaacggcagtttactgcccggcaccagtacagaaaagatagaaacatggtacgaatattatgtccgtaccatgaaggagtatggatttgacttcttgaagatagacaatcaatccttcaccctcccgctctatatgggcggaacgcaggttatccgacaggctaaagactgcaaccttgccctggaacatcagacacatcgaatgcaaatgggactgatgaactgcatggcacaaaatgtgctgaacattgaccataccttgtacagcagcgtaacccgtgccagcatcgactataagaaatatgacgagaatatggctaaatcacatctgttccagtcatataccaatacactcatactggggcagaccgtctggcccgaccacgatatgtttcattcctgcgataccgtttgcggcagtctgatggcacgttcgaaagcgatctccggcggacctgtttacctgtccgactctccaagcgaatttattgccgataatatccgccccctgattgatgaaaccggaaagatattccgtccggcggctcccgccatcccgactccggaatccatactgaccaatcccctgcaaagcggtaaagcctaccgcgtatttgcccctacaggagacgaagcgctctcagtcatttgctacaatctgaatacttctcccgcttatcgggaagtagaaagtttcgtcaaacaggaagattacctgttacgggaaagcaccggcaaatccgcagattcttcttccgacaacattctcgcattcaactgggaaaaacagagcgccgaagtattgaatgcatctgaaagaaaaataaagttatccggatttacagatagtctgttccatctttgccccatccgtaaaggttgggcagtgatcggcatacaagaaaaatacctgtcgcctgccactgtgcagatactcaaacgtactaccgataagctgatattggatgtccactgcaccggtacattaagaatatgggcagactcccacgggaaacaggaattacgaagtataccgatcaaaaaggccggcagaattgaaataaagaaataacactaaataattaatccatgaacaaaaaactacttttccccctcgcactcgtgccactggctgccaccagcctgcaagcacagaagtccgcccagacacagcgtgtggacaaacgccccaacattatccttttcatggtagacgacatgggatggcaagacacttcactccccttctggacacaaaagacagattacaataagctgtacgaaacacccaacatggaacgacttgccaaacaaggcatgatgttcacacaagcgtatgccagcagtatcagttcccccacccgatgcagcctcatcaccggaacgaacgcggcacgccaccgggtaaccaactggacgctgcaaaagaacacaaagacagaccgcaaggataaagtactggatgtgccggactggaactacaacggagtaagccaagtgcccggcaccaacaacacattcgtaggaacctccttcgtacaactactgaaagacagcggctatcatacgattcattgcggaaaagcacatttcggtgccatagacactccgggagaagacccgcaccactggggcttcgaagtaaacatagccggacatgctgccggaggactcgccagctatctgggagaagagaattacggtcacaacaaagacggaaagccaatatcactcatggccgttcccggacttgaaaagtactggggtacggagaccttcgtcaccgaagcattaactctggaagccatcaaagctctgaacaaagctaagaagtacaaccagcctttctacctgtatatgtcccaatacgccatccacgtccccttggacaaggacaaacgtttctacgacaaatacaagaaaaaaggcatgaccgaccatgaagccgcatacgccacactgatcgaaggcatggacaagagtctgggcgatctgatggactggctggaaaaaagcggagaagccgacaacactattattatcttcatgagcgacaacggaggacttgccgccgaatcgtattggcgtgacggcaaactgcacacccagaatcatcctctcaacagtggtaaaggctccacctatgaaggcggcatccgtgaaccgatgatcgtcagctggcccggtgtcgtagcccctggcagcaaatgcaatgattacctgctgatagaagacttctatcctactatcctcgaaatggcgggcatcaaaaaatacaagacagttcagcctatcgacggcatcagcttcatgcctttactgaaacagaccaggaatccttccaaaggacgcagcctcttctggaatatgcccaacaactggggtaacgacggtccgggaatcaactttaactgtgccgtacgcaagggtgactggaaattaatctattactatggtacaggtaaaaaagaactattcaatatccccgatgatataggcgaaagtaatgatctcagtgcacaacatccggatattgtgaaacggctttctaaagaattaggaacctatttgagaaaagttgatgcccaacgtcctacagtcaaagctacgggtaaaccttgtctttggccggacgaaattgagtaatcattcaccagtttagtcagctccaaacaagtaacatgatattccagctaaacagaccaaaaactatgcattttacgaatacatagtttctaaggctactcaaatactggtataaagcagaaagcctacaactattattatattaatacacagccaaatacagtttactatattctcaaagtattctcatgcctttgagaaaaaattctcaccacgatgagaaaaaattctcatgcctttgagaaaattttctcattgcagtgagaaattattctcattgcggtgagaataaaagactttgcaggaatctgataattagttcattacttttcgtttttcagatgctttagttctttactcattaagtataggttcattgaaacataaccattcttgcattacttattattatttacgtaacaaagcagactattgtggaataattccacactcctcaccccattttccacacattccccatgcgtttccacacaatagacaatgtacatcattcacatatctcacttataatcaatacattgatagcgtacatcagtctttggcacgcactttgatctttaattagccgttagataaagcaacaaccgattccttaacacataagagagaattgaaaatatatgtttaataatcattaaagcaaacgattatgaaaaaattagtattagtagtagcaatgtttatgtttgtttgtggtggttcattccttgttaaggctcagaactctgcagaagctgcgacagccctggcagaagttaatgcaacagctatcgttaatgatacagtagtaaaagatactgtaaccaagagcgaggaacctgttaagacagaactgagtgcaccgaccgctattgtcaatgatacagtcgttactgacactgcatccaaagacaaaccggctgagcctgtcaaggaataaccttccaaaaactcacggaacatagtctgccgaacaatagtaagcacactacaaaaaaagccatccctacttcgtctattccggggatggcttttttatgttcttattttccctgaacgggaatcattcaactatcggttttcacgttccagtactgccaaccgggcatacaattcaaccaatgctccctgatggagtatttcccaaccggtcttggtcgttccccctctcagatcatcgtcattcagcaagttgttgccctgatgacagctactgctccacgcatgaatcattgacttctcaatgtcatcgatatatttacggtcattgtctatagaataaagttcaaagaatccgcgacacatgatcgtattgaaccaggcgtgtcccggagcaaggatgttgaaagtaagattcagctctttggaacgatagggcataaaccatttcttatgacagctttcagcaatcgcatacgcttcatccagatatttctgttcgccggtaatcttatataagagacaggctgcctgcaacggctgtccggaattgtaagaatacttgttcttttcaagatcgcccggcagattgggatcatccttattcggacgtacattgtcatagaataaatggtcggacttgtcttgcaatacatccagcatatagtcgtaacatttgatcgcccagtcgagatattcctgttcctgagttgccagatacatcttacagcccatcacagcagtaggtccggtagagcaagagtgcttgctggtagtgtgttcgttcaactccctccagtgtacacctcctccgcaagtctcatcccaaccgtgatcgatcaggtagcgccataccacctttgcctgtgtcagataacgcatctctttcgtttccgtataccagtcgaccatatcgagcccgatccatacgttatcatcgtaaaaacgttcgttaccggcagccgggtagcaagaataagccaggattccacgatccagctgacagaaatactgtattcctttgaacatcatatcatccattgcgccatagatattctccacttcgctctctttggttgcatcacgcatagcgacaaatgccgaaagaccgccaccttgtccccaaactaacgcatcaccatcccaataaccttttccatcataaggataattaccacgccagcagcttctggaactcttgccgaaataatatccaatgacagaagtcatgtaagaatgtgcacggtccagcatttccggcagtttcagttccggctcatccaccttttcatgataaggcatcataatacggctttcgggtaccgatcgcttgccggctttactgatagctacggcagaaacttcgtaagtagcaaaataaggaactttcaacagatattcctgtgtaacatcacgttctacctgtatgatgatatgtcccggcgagaagtcggtagcacgagacaagctcgcttccacgtccctgtaagagagttctaccatatccacgtcgcgattactgggattggtccatttcaccagaagttcattctcgttattggtagcttctacggaaaatgaacctaccggagaaatattgccactgatgggatcattctgttctgagtttgactgatcatcatcactacaagatggaagtaatgccaaagccaagaagttcaatataaacagtttgaatattgctttcatttttcttcaaatttagagattacttaaaaggtacttcgataggagcttccccgaatctgctcattgggaattctgtagcattgaagctgtcgtacttacaaacatgcatcaacaactcgtgatcggagtcagtaccatcttcaatgtaagcaaccggtgcaccggcagagaaatcccagcgtcctaacaaaccttccgggttttcttccacaaagtcccatgcgttggctttcagttgcgcttccgtacggcatacagaccagatacgtgcttcaagtacagctccgcccaagaaacgattattatcactagccttaccaatggatacttttcctccatcatttcctgcgcaaagatctatttctgagaaattgagatcattcctctttatttctccccaggcaactctgctgccattaatataaagcttgtacttttcactcggattactttgtgctacgtcacagtctaccaccaaagccagatgcatccactcgccaagcttaatcgcattatgccctgttctcagttgtaatttatcgcctgtccctaccaggtcaatgactttccactgattaccgccttctttgcctttttcaccatcgtcaccgccacggagaataaagtaaccttctttacccataatggtctgcaaccaataagtattatcgatacggcaagtcagctcccaggtcatcttcttcaatttgaaattgttggtcgcagctttcaatgcttctactccttcgcctgtcatttctccgaaatgcgtccacacggcatagtctcttcccagattcatacaccaacgtttgtccggtgcaatcttcacctgaataggttgcgatacctgtcccttggcgtcagtcagcgtaaaggaagtttcgccggcttttcttccggtcactgtcactacgttaccataaagttcgagacggactactttcgtatcgccggcatcaagtattttatactctccgttaccactcaaaatctttacttgctgagaaccttgattagcattgatcagtacacccttttcatcagcgtcggtcgtaatctgtttaggagcaatcacattcagattcacaaaggcttcttttcctttccggtcggttatcttgacctcggcatttccctgggcgatgcctttcacggtgaatgattccgagtcttcaagtgtagactgatcgacttcgatacaattattttcatctatcacttccagcgaataacctccgtttcctgtatagattttgacgaaagcttcatcggcgccttccacctgcgaataaagcgtaaataacgtcttattcaacttcagatcaaactctgccgccgtgttaaccaaaatcttagcgcgctggtagtacttgtctttcacgtatactacaccctgagcattgttatgtccttctacagctgtcagtgtcactatatcactatcgacttctgccgtcaccacttcttcgtttgccgaagtcacctcatattcgccattaccggacgtaatttttacggttctggtatccccctgtgcgatactgatttcactggcgtcaacggttagctctgccagattctggggtgtctcattatttttgttgtcgttatcatcgccgcatgcactaagacaaagcaatgatgcgagaacgaagtatttcatcactttcatatatattataactaaggtaaattactcttctacgtctacattaggatagtctactctcaatacatctcttgacatagagaaagtaccttcgaacgacatcattaatgattcgccctgtgcagagtcctgatattcataagccaattcaatggtagtaatttctgtataataacgttggtctgtatagttatacgtatatttacgactgagtttggcactataaggtttaaacttcaatccatccacatggctggttaacgttatgtctccgaaatcatcacgttttatttcaaccacataattcagatagtccgtagtgttggaacgtgtcttctcgcccacaaacatatagcaggtattattattaattgcataaagttgtgtgctggtcgtttcagtcgtataagttgttccctgttgtgtcacaacgcccttaccactataaatacccgaataatcgttcttgaaaccgatatgtgccaatactttcgtatatttattcgctcccatctcttctcctgtagaagaagtgatgcgcaagggaagtacataatcattatacaagttgcctacttctctaatcttattcaagtcgatatggatataagccgccgcattcaattctccacttttaatattccatgaatcggcatcaaacgtataggttccttccggcaatattttataatataaatccgtctggctcttatacttgtccttattatacgcatccagcgtatccgggtcaacttccatcattatatgaatttccttatcatttcccgatgtaccatttactccgaaatatacaggaagtacggtggtattatcatcagctacctccaatgagtaatcctgccaaccattatgaatgatatatgtattcttcttgaataattcatcttccaatttatcgcatgaagaaactccgggcagcatagcgatcagcagacttcccattattccgtatatagatattatttttttcataataagccaattttatttagttttaccattcaggattctgcgtcatattcacgttacgtttcagctcgtaagtcgggaaaggccacaaatacattttctgttcaaacactttgtgtaccgaggtgatgatagtctgtttataaaaatcagcaatacgcgtttcatcatcactgatattaatgttacacccctgcaataactggttttcttctgtcatagcatctttccaacggcgtaaatcaaagtagcgcatactattctcacccaataactctatctggcgttctcttttcaatttcacacggaaatcgttcgggttattataagtctcctctgaatagtcaggtactccggcacgcatacggatacgtttgatagcataacgcatttcatctacactgcgctgaatctctacatcagctccggtataggtagtcagatggtaaacttgtcccgaagtcaactcattcaacgcttcggcataaatcagaagaatttcaccataacgaatggtcatctctgttttatcaaccagatatccgccttcagtccgtgagtcttccgaattataaaacttctttaaagtaactcctgtcagtggacattcttccttaaatccctgtttgccatcgttcagaccacgataatagaatatctgttgatcgcggaattcagattcagaagcactggaagcttcccaaaccgaaccattataagcgatggacgcatagaagcgtggttcacgattattgtacatcaaattcaccttagccggcaggaaaggattcgccacagcatacgcctgtgtagtgaaaccttgggttacgtaatcaccggtagcttccgcctctgtgatagaacgtccgtcgttcatcgcatacgcatcgacctgcttctgagtaacagccaaccgattgtttccttttaaagtctttggcgtagattggtaagcccagtcattgatatgtcctgttccaattcttgtccgggtaaatataagttccggatttttcgatcccagaatcgtaccgtcaaagttggacttataagaaagtaacgggtctacgtccgcccaaccttccggatagttcttatccgaataaagtgcattatgaggaggacgttgtgaaggcagaacggtcgctttcggcgctacaacatacagttcatacagaccggaagccttagccaattcaatcacatccttagcagctgccgccgctttcgcccactttgtttcatcataagtctgagacactaattgattaccatagcagtctttcacattaaagaaatccgtatttccgttgaaaagcgggctggccgcataaagcaacacacgtgaacgaagtcctaatgcagctccgcgagtcggacgtccaagattgttgaccgttcttttagtcggtagtgaacgggctgattcagccaattcctgatctataaaatcaaccagattatcaaaatgctctcgtggcaaggaaagttcttcataagaaagattcacatccagtccttccaaaggaatcaaaggtacgggaccatagacgcgtatcaaagcccagtaacaataagcacgcaagaaacgtgcctgtcctttcatatcggctatttcatccatcgtcagttccgaacagcgatctacattctgaatgaaagtagatgcctttcggataccttcataatatttccacagtcgtgactcattttgatctttatcgctcaattgattatcagcactatagtttccttccacataatccttcatgtccggatggtaaagatcatcactagcccagcggaacggttctctatattcaccaatataatccattacactgtatgcactcgacaaccatccatccacatacacacgtttggagaaagcggagtccaaagatacctgatcataaaagtatttgtccacattgatataatcggtacatgacgagaaggacaatgtacctatagccagcaatatggtataaagtattcttttcataattcgtagtttttgatttaaaagctaaattgaagataacaggagaaagttttattaatcggatagctacttcccgattcatttgtaccttctggatcccaccagtcaaacggtgcccaagtaaacaagttctgtccgataaatccaagacgcagattactcacaaggaacttgcgtgtccatacctgaggaaagtcataagaaagttccacatttcttaagcgcagatattttctatccttcaaccagaacgtagatgctcggttgttcatattgttgtttccataagtcaggcgaggccagtcggcattcggattttccgtagcttccgtgcccgaaatttcctttggaatccaacgattaccatctaccataacttgcagaatattacctgtacgaccgtcatggaaagcatgaggtccactgccgcctacgaaaaagtcacatttaccggttccttggagaagcatgctaaagttccagttcttccaactggcgctcaagccgataccatactgaagtcccggctgctgacgatatcccaaaggtacctcatcatccgttgtgatgactccgtcaccattcacatctttatatttaatatctcccggaagtattgttttgttagccaaagatgcctgagaaggacttctgtcaatgtcttcctgatctttaaacaaacccagggcgataaaaccacggctctgattcaattggaaacccttattcatcttgtaccataattcattggcggcctcatccatatccaggatatcagttttctgataagtaaaattaccacggagttgcagactcacctgtccaatctgctgggtgaaagcgatatttccatcccatccgactgatttcatcttacctacattggccataggtgtttggtcggcaagaccggttgtcagcggcatttgattgcgttgcataaagatatcatcccgtttatcaacaaagtaatctactgttccggtgactttcccattaaagatactgaaatccacaccgatatcatacttcttggcaacctcccaggtcaaattcgatgttcccagtgttttaatacgataaccttgtactttgttagtaccaaattcaccaaaagtatacgatcctccatcatccgtacttaccaaagatatataagggaagcgacgtgccttatcatcggtcaagctagttctcaactggtcattacccacctcaccataagaagctctaatcttaaacagatccaaccacggcatcgctttcttcacaaacgattcttccgaaaccacccatccggcagatacggccgggaaaaagccaaattgctttccatgttcaaaattctcggaacctgtataaccccaattaaattctgccatatacttatcttggaaagcataagtaaaacgtcctgaataagccaagttgcgatgaggaatagatcccatcaaatcactctcatcaaaattgacgtcagtagtctcttgctgatagaccatagcaaacactccaacgcgatgtttctgagcgaacaatcggctataatccaaagaagcttgcaaataataacgtttatctccttccactttttttgtctgagacattgcagcagcattctgtactctcttcaacaccagattaccgtttgcgtcacgagaatattccgcagaccacaactcttgcgctttagaacgacggatggtattcttattataggtatcaaaagcaaagactccggaaaatttcaagcctttcgttataaacgacaagtcctgatccaaagcaacgctactttctactttgctttcccaaatagtgcgatatccggtttgagtcatctgatactcaggcgtagtcatgccattaacaaccggccattgacctgtagaccatttacgcggagaagacagcggagtatagtaagcaaaggatttccagatatcatccgcatcgctctgtggagaattgcggttaaccaaccatccgcctacactcactttcaatatcgttgaacgggttaagttcatatctacattcgcacgatagttccaacgttcatacgtcgtatttgtattgtatttattttcagaactggaagtacggtaacgtccgtcttcactggtatactgtcccgatacgaaataacgtacattatcgctaccaccggagaaattaatattggcataatagctgggagctccacttttcagcatcaagtctctccagtctacattcggataaagatcagagtccagtccataccggataatattcatctcttcacttgtatacagagggctttcataacgtccttccaaagcctcattagccaaactcgcccaatcataagcatttgcatattcaggaaccttcaccggagtattccagctgaaaccggttttcacattaatcttcactttccctttttcaccacgtttggtagtaatcaggacaacaccatttgcaccacgttgtccgtaaatggcagttgccgacgcatccttcaacactgagaatgattcaatatcttctaccggaatctcattaaagctacgttctactccatccaccagtattaaagctcctgacttggcaccaaatgtactcataccacggatccagaactctgacatattttcacccggttcaccgctggtttgcatcgctatgatacccggtacaacacctgccaatgcattcgaaagattagctcccggagcattcaactgtttgatatcaacattggtaatggcaccggtcaaggtctttttcttctggataccactggcagtaatcaccacctcatcaatcttacggttatcttctacaattttcactttcagattattccggtctttgatcgataacacaggaatttcaactgtctgataaccaataaaagtcacttgaagtacatcataagctcccacctttatggtaaactctccatctaagttggtaatcgtaccgacgcccggctgatttttagcaacaatcgacgcaccggcaacaggaccaagattatcttccactacccccttgattacaaattcctgcttgctctcctgtgcccatgcactatcaggcacgagcagcattaccgtcaagagtaatacgatacatttttgaatattattcatggataattctttttatagattatttattctactgtcacacgacgaataacatggttatcgcggtcagccacatagaccgagttgtccggataaaccgtcacacattcgggctgattgaattttgcttcttcgggcaaaccgtcaccaaatccactctgctcgggttggccggcgtacagagaagcggaacctgccggtgtgattttacgaataatgtggttattacgttcgggaacaaacatatttccgtcttcatcaaatgccatctgctccggcttattcagacggacagtcgcacctgtaccattgatatagccactttcatcccatgcgccgacaaaaagaaccggattcccaaaagtatgtgtagcagcatcataaggaacctgatagatacaatggcggttacataccgctacataaaggatcgtaccttcggtattaaaagtcatacgggtttcaatttccgttgcattgttaattcggaagagaggggtaaagtcttcgtaactcggtccgtcaaaacgatacacatagccagtacctttattacagaagaacacttcccctgttttgggatgtactgccagtcctgtagtgccgactttcttcgctctgcaaagtcctcttacatccacgaatccaccttcgcgcgttacataaataatattgaagtcagtcttggtattactctcatccgtataggaatactgagagatataaagagtgtcctgagccggactgaacgccagacaggtaggtgactgaaacggaccgctggaacactgcaccaaagtttccacttcaccattacgtgcacggcgcaaagcaccattctgtgtctgaccacgtccttcatctataaagaataccgaaccgtctttatcagtcagcaaaaaccaggttctctgcagcttggaagcagcataactgccgtcctcacgaccattcataccgtgttgtcccaccatcgtcgtcacattacgcttaaactgataacggaattttgtctcggaagcatactcttctatattttcgtctttacctataaacagacgaacataacctgtatctgcacgtgcgggaacgatggcatagattacctcatcgtccattcctacaatagctgcttccttgttatttacagtgaccttcacataacttggatcggaaccgaaattttttccacggatgattaactgtgttccgataccaccactgtcgggagagaaactttcgaaaacagagtgtttactcaaatcgggaggtaaggcttgattttggcgtatcggagccaagtcattgttgcaaccccaaaaggcagacatccctattaataaggtaagtccgatttcaagcttacgcttcataaataaattaggtttcataagatattaaatttaattcaaacaaaatgaaataaaaggtaaaaaggaatcattgcatacttaaataaattaagtggaggatcgtgttgttgattcatagtttcatgagatatttagttaaacatattatatatattcctgcttctttattgcatcagcaaaattagcgtgtttgccaaaattctgagttttccttcttcgtgttttatgccacacggcagggatatttactattttggcatgatttgataatattccggttttctttaaaagttaaattccccgcaatgaaggctgagataagattcagaatatcgataacaggaaaacgaacttcttatttacttttttggcatagacatttactcgcttacaaacctgctatagagcatattctctcagtgtaatcagactcttcaccttccggaaaaagtctcgttatgctatacagacagtcaacagaagggactgattattgtacttcttccaagtgtttggtccggaattcttttggcgtgcatccgtacttttcacgaaatactttaaagaaagtgaccttattagagaatccggcttcgaatacaatttcatcaatcgtctttttcgttttcagcagcaaatctttcgctacatacaaacgacactccttaatcataatcgtaggactttcttcccccatctcctccattttccggtaaaggctgcgaacgctgatagccaaatgatcggctatgaaacggggagtcagttccttctcctgaatgtggtcattgataatcttcagaacagattgctggaactttttcgattccttatgtgtcagtttaccatctgtcttttcaaaagagctgattgctgaactgaaataatccttcagtacttccttacgttccaacatctgacaaacagagatacggagatattcggcattaaacggtttggtgatatacatctcggctcctgcagaaagtgcagccatctgctgttccatttcatgccggccggaaaccataataataggtatatgtgacgtttccttcaccgacttaatccgtttcgtcaattcgataccgccaactcccggcatcatgatatcgcaaatgatcacattcggataaacttcattcaatacctgctccacccgttccggctcctgcagggtgaccacattaaaatcgttagagaagatttccccgatgaaccacaacatttccagttcatcatcaatcaccaacaatgtaggccgcatcttgtcaaattcatagtgaggaagtttcagcaccagttgcgactctatttttggaatgtattccgaagtgattcgtttagaagacgatacgccggtagtcacttccagcggaggcaatgacaaagtaaacaatacccagccgtcaggcgtattttccaccttcagcataccattcagcaatttcgccatattgtaggaaatggcaagtcccagcccattacgggagaagttcttttcatcctggttttcaaagctatccaggatagcataacggttgaaaacatattgaaagtcttcttctttaatcgtacttccctcattagcaacccggagaaccagcaggttttcatcgttggtatccacttctattttgatacttttcccatccggagtatacttgaaagcattggatatcagattgataataatagtattcagaaaacctttgtctgagttccaggaaacttgctcgggtatcttgctcaggaatgtgatattccgggatttagccatatcgacaaaggtctttgccgtatttttcattaaggaagatacattcagggcttcgatcctcacttcccggtttccggtttcgatacggcggaattcgatcagttcgtgaatcaggttattcaaacgttccgcgttcgtctgaatcatctgaacataatcgactacgaatttactgagtccttttgatgaaaggatacgtccgcaaggaccgtagataagagtcaacggggtacagaactcgtgagctatattagtgaagaaacgaagtttcgactcaaatacattcttttgatggcgtttctctatttcattcagcagttcctgctttttccgtttggtgcggagaatgaatgaacgtaccagcatggcggctatcataagcagacataaagaataaatgagatacgcccaccaagaggcgtaccacgggtcaccgatccgtatcaacaaagaatagacttcactttctttatcgaatacactattgtagtacttcaccaataacgtatactcaccgggagccatgttcgtgaaagagacagaactttctttaccattattaatccactggtcactcaatcctttcagtttataggaataggtgcagttatttccgttcagataatcgacagaggtgaatgaaacggcaaagaagttctggtcgtatttcaaattcagtacttcattctcttttttacgggtgataaactctccaagattgtattgttctccaaagatagagagtttgtcaaagtagatgggaggcatataaagctgttcgggacgtccgtctgcctgaatagctacaaagccgttgattcctccaaaaaacagtatacccgtttgcgggtctctgtaggaagctccgtcactaaattcgacgactttaagcccgtcgccaaagccgtaagagcggaatacatttcttttggtatcaaaattaatcaatccctgattcgtactcagccagaagttatcggacgaatgcctcagaatggcatgaatagtactgttcagaaaaccgtctttcgcattaaacagttgataagagttttctgaggcatacttgatgactccataagtagtaccgatcaaataattgtccgcatcatcttttataataggtactaccttgttcaagttcatattctcatacttatgagtggtcagcggttccaatccgttgatcgtttcattgaagcggtataccccgtatcccatattgccgaacaacaggttcagactgtcccccttgcagatcgtaaagaagtaattagagccgaattctccgccattgaccacatatcgttgtaacttttcaagaaccggatgatccggtgtacctccgatacgcgctctgactactcccatccccacactggccagccacaattccgagtcctccgtttcataaatatcatgtatgtatttgaattcctcattatcaatccagagaggaagtttcttgatacggcgttcacgatacgaataaaagttcagtccttcttcatcaccgatccatagcaagttacggttactttctctgatacagtagaccgcattactgcctaaaccactgttcgatgttgtcagtatctccgagcggcagtccgagatattcttttgtacctcataatcaaaaattttaagtattccattccctttggtaccgatccaaaaagtacgctccttgtcaagcagcaaagcacgcacgggccgttctatcttttcggtatagttattcagtaccaccgattttatagaataaagaggatttgagtaaagataaacgccctgcccatccgtaccaatccagacaacatcctgaaagcggtcttttatcaggctgaatgttccgctatttataggtaaggtctgaatctgatattcaccgctgcccttttgtttttccaacgtcagaacaccgtccatcattaagccgacaaaaaagctatcatgatatttaacaatggaggaaatcttgtcatgcgcctgtatgttcgctcccaggttagctataaattcattctttttactctcaatatgaaaggcatagagattgtattctttatccacgtagtaaacggcggcgtcatcgtaaaagctacaaatcaatggcgtgtgatgatccaaaccgcttttctgcgatactaaagtgatattctccgtcagagggtcctgttgcaggtcataacaccggttataccctttcatcatcacccacatacggttatttttatcaaagaagaaagtaatgacatccgatatcgggataccggtcacattgattttcttaaagatgccttccttcttatgaaaataatagatgcagttggtgtctttaatgataaacaaggtgccatgattatccttattcatcaagaagagtttctgaaactcattaaagcgtgtaatggagttcgttttacggtccaggcgtatcaggctataataagtctgaaaccaataagtatcgttaccggtataaacaatattatcaatttgattgccggataagtaatcctccttgtcacgggtcttaaactcttcgatctcctgaccgtcatagatattgagtccgtcacaagtgccgatccacatcagtcctttgtcgtcctggcacagagaagtaatagagctgttggacatatattctttgtcggcaacctgcttcagattataggcaccggctgtattcatcagcagattaaggcagcagaagaaaagtaaaatacaatgttttttcatggcatagaatccttagatttgcaatatgacaaaggtaaacaaaaaaactttccagcacttttttggcgcagaatatatgtaagaatgcgtgccagtttggttaattatagcgccacagggcgatttagtatttcgacttccggtagcggcattccttttctctctattttcgtcacagaaactaattttattcataaattcatttgttcatgaaaacacatttttcatttaaacacctgttatttattggaggtgcggtgttgtacagcatgcaaatttctgccgtcaagaatccggtagactatgtcagcacgctggtaggaacgcagtccaagtttgagttatcgaccggaaatacctatccggctacggcactgccgtggggaatgaacttctggacaccgcaaaccggtaaaatgggcgacggttgggcatatacctacaatgccgacaaaatccggggcttcaaacaaacacatcaacccagcccgtggatgaacgactacggtcagttctccatcatgccgatcacaggcggactggtattcgaccaggaccaacgcgccagctggttctcgcacaaagcggagattgccaaaccttattattataaggtgtatctcgcagaccacgacgttaccacggaactcgttccgacggagcgtgccgttatgttccgtttcacgtatccggaaaccaagaacgcttatgtcgttatcgacgcattcgacaaaggctcttatgtaaaggtgattccggaagaaaacaagatcatcggttattctaccaagaacagcggcggagtgccggagaacttcaagaattactttgtcatccagttcgacaaaccgtttacctttacttccggcgtgaaagagaacaacattctcccgaacgaaacagaagttcagggcaaccataccggagcgatcatcggattcgctacccagaaaggggagatcgttcacgcacgtgtcgcttcttcttttatcagttatgagcaggcggaactgaatctcaaagaactgggcaaggatagtttcgaccagctggtcactaaaggaaaagacatctggaaccgtgaaatgagcaaagtagatgtggaagacgataatatcgacaatctgcgcactttctattcctgcctctatcgttcgatgctgttcccacgcagtttttatgaaatagacgccaaaggacaggtcgtacactacagcccttacaacggaaaagtgctgccggggtatatgtttacggataccggcttctgggatacgttccgctgtctgttcccattcctgaacctgatgtatccgtccatgaatcagaagatgcaggaaggactggtcaatgcgtaccttgaaagcggattccttccggaatgggcaagtcccggacaccgtgactgtatggtcggcaacaactctgcttccgtagtagccgacgcttatatcaaaggactgcgcggatatgacatcgaaacactttgggaagcattgaaacatgacgcaaacgcccatctccgcggcacagcttcgggccgccttgcatacgacgcctacaacaaactgggttatgtccccaacaatatcggtataggacagaatgttgcacgcacgctggaatatgcgtacaacgactggaccatctacacgctaggcaagaaactgggcaaaccggcaagcgaaatcgacatcttcaaacaacgtgcactgaactacaagaacgtctaccacccgaaacgcaaactgatggtgggcaaagacgacaaaggtgtgttcaaccccaaatttgatgcagtagactggagcggcgagttctgcgaaggcaacagctggcactggagtttctgcgtattccatgatccgcaagggctgatagacctaatgggaggcaagaaagagttcaacaacatgatggattccgtctttatcattccgggcaaactgggcatggaaagccggggcatgatccatgaaatgcgtgaaatgcaggtaatgaatatgggacagtacgctcacggcaaccagcctatccagcacatggtttatctttacaactattcgggagaaccttggaaagcccagcactgggttcgtgaaatcatggacaagctctacacagcaggccccgacggatattgcggtgacgaagacaacggtcagacttctgcctggtatgtcttttcggctttaggattctaccccgtttgtccgggaacagatcagtacattctgggaactccccttttcaaatcagccaagctgcatctagaaaatggaaaaaccgtcacaataaaagcgaacaacaataacaccgacaaccgttatgtgaaggatatgaaggtaaatggtaaggtattcacccgcaattatctgacgcacgaccaattactgaagggagcgaatatccagtatcagatgagtcctacgccgaacaaacagcggggaacgactgaaaaagatattccgtattccctttcatttgaataaaatgtcgtacttttgaatgctttaatgaatgatctaatccaaacaaactaaagaaaacatgaaactaagaaaccttttatttatcgttcttgcagcgatagtcttctgcaactgccagagctatcagcctacttcgctcaccgttgcctcctacaacctgagaaatgccaatggttccgactccgcccgtggagacggctggggacagcgttatccggtgattgcccagatcgtgcaataccacgatttcgatattttcggcacacaggaatgcttccttcaccaactgaaagacatgaaagaagcccttcccggctatgactatatcggtgtagggcgcgacgacggtaaagacaaaggcgaacactccgctatcttctaccgtaccgacaaattcgacatcgtagagaaaggagatttctggctgtcggaaactccggacgtgccgagcaaaggctgggatgccgtattgcctcgtatttgcagctggggtcatttcaaatgcaaagataccggtttcgagtttctgttcttcaatctccacatggaccacatcggcaagaaagcccgtgtggagagcgctttcctcgtacaggaaaagatgaaagagctgggaagaggcaaaaatctaccggctatcctgacgggagacttcaacgtcgaccagacccaccagtcctacgacgcatttgtcagcaaaggcgtcctctgcgattcttacgagaagtgcgactaccgatatgcgctcaacggtactttcaacaacttcgatccgaacagttttaccgaaagccgcatcgaccatatcttcgtttcaccttctttccacgtcaagagatacggtgtgctgacggatacctatcggagtgtacgggaaaacagtaaaaaggaggacgtgagagattgtccggaagagatcacgattaaggcttatgaagcacgtacgccatccgaccatttccctgtgaaagtggaattggtgtttgaccaacgtcagcaaaaataaccccgaatacttcattaaataatctgatacccatatgagaaatatatgttttgtagcctgtatgttgttttgcctcgcttccgcttacggaaagacggtgaaaaatcatcctttcgtgtccattgccgactctatcctcgacaatgttctgaatttatatcagacggaagacgggctgcttaccgaaacatatcccgtgaatcccgaccagaaaatcacttatctggcaggcggagcacagcagaacggaaccttgaaggcctcctttctgtggccctactcagggatgatgtccggttgcgtagccatgtaccaggccaccggagacaagaagtacaagacgatactggaaaagcgcatcctgccgggactggaacagtactgggacggagaacgccttccggcatgctatcagtcgtaccctgtcaaatacggtcagcatggacgctactacgatgacaacatctggatcgcactggattattgcgactactaccgcctcacaaagaaggccgactatctgaaaaaggccattgccctgtacgaatacatctacagcggctggagtgacgaactgggcggaggaatcttctggtgcgaacagcagaaagaagcgaagcacacctgctccaatgccccgtcaacagtactcggcgtcaagctataccgtctgacgaaggacaaaaagtatctggacaaggccaaggaaacttacgcatggaccagaaaacacttgtgtgatcccgacgacttcctttactgggacaatatcaacctgaaagggaaagtctcgaaagacaagtacgcctacaacagtggacaaatgattcaggcaggcgtattgctgtacgaagagacaggagacaaggattacttgcgcgatgcccagaagacagccgcgggaaccgatgcctttttccgttcgaaagcagataagaaagacccgtcagtcaaggtacacaaggatatgtcgtggtttaacgtgattctgttcagaggcttcaaggcgctggagaagattgaccacaatccgacttatgtccgtgcaatggcagagaacgctctccacgcatggagaaactatcgggatgccaacggattactgggcagagactggtcgggacataacgaggaaccttataaatggctgctcgataatgcctgcctgatcgagctgttcgctgaaatcgagaaataaaacattgattattaacccttacatgaatttaaaaaaacaattaccatgaatataaccaaaacactttgcctctgcgcagcactttcgggcgctgccggcgtgcaagcaatggaaaaccgcgaatttgtgacccagcaagacaatacccgggtcaataattaccagaccaaccgccccgaaacctccaagcgcttattcgtatcgcaggaagtagaacggcagattgaccacatcaagcaactactgaccaatgcgaaactggcatggatgttcgagaactgtttcccgaacacactggacaccaccgtccacttcgacggaaaagaggacacttttgtatacaccggagacatccacgccatgtggctccgcgactccggtgcacaggtatggccatatgtgcagcttgccaataaagaccccgaactgaaaaagatgctggcaggagtcatcaaccgccagtttaaatgtatcaatatcgacccgtacgccaacgccttcaacatgaactccgaaggaggcgaatggatgagcgacctgacggacatgaaaccggaacttcacgaacgcaaatgggaaatcgactctctctgctacccgatccgcctggcataccattactggaaaacaacgggcgatgccagcgtattctccgacgaatggctgcaggccattgcaaatgtgctgaagactttcaaggaacagcagcgtaaggacgacgcgaaaggtccgtacagattccagcgtaagaccgaacgcgcactcgacaccatgaccaatgacggttggggcaatccggtgaaacctgtcggactgattgcttccgctttccgcccttcggatgacgctacgactttccagttcctcgttccttccaacttctttgccgttacttccttgcgcaaagctgccgaaattctgaacaccgtgaacaggaaaccggcgctggccaaagaatgtaccgcactggcggatgaagtagaaaaagcattaaagaaatatgctgtctgcaaccatccgaaatacggtaagatttatgctttcgaggtagatggcttcggcaatcagctactgatggacgacgccaacgtgccgagtctcatcgctttgccttatctgggtgacgtcaaagtgactgatccgatttatcagaatacccgcaagtttgtatggagcgaagacaatccttacttcttcaaaggcagtgccggggaaggtatcggaggtccgcatatcggatatgacatgatatggcccatgagtatcatgatgaaagccttcaccagccagaatgacgcagaaatcaaaacttgcatcaaaatgctgatggatacggatgcaggtaccggcttcatgcacgaatcattcaacaaaaacgacccgaaaaactttacccgtgcatggtttgcatggcagaatacgttgttcggagagctgatcctcaaactggtcaatgaaggcaaagtggacttattgaacagcattcagtagtctctactccatctttacttataagataactgcttcatacggtgaaaccgatagttccatgctttggaaccaatcgtttcactgtatgaaacaagagtttccatgcctttgaaactaaagtttcaagcttccgaaactaaagtttcaagccgctggaactaaagtttctcactgatgaaaccatagtttctcagcgctgaaactttagtttctcgccgatgaaactttggtatcaaggcgcagaaaccgaccttcttcgccgtaagcgtctccgcgatgccacagtgacagcaaaactactgtcactctgctatcacaccttgccgtcacctcataacaatcacataatcatctatttgcccccatttatgtgacagatgacagcaaatttttattttttaatttatatgtagagagtatatactcccccaataataattatataatatgaaatcaacctttttatttctggttactacaaccatgatgacttgtaccgccttaggacaaccttccaacgacaaaaagaacgtattacccgactgggcattcggaggcttcgaacgaccacagggagctaatccggtgatatctcctatagaggacacgaaattctattgtccgatgacacaggattacgttgcatgggaatccaatgatactttcaatccggcggctaccctgcatgacggcaagattgtcgtgctgtatcgggcagaagataaatccggtgtcggtatcggtcaccgtacctcacgtctcggatacgccacttcgagtgacggtattcacttcaagcgggaaaagactccggtattttatccggataacgatactcaaaagaaactggaatggccgggcggatgcgaagacccgcgtatcgccgtcacagcagaaggactgtatgtgatgacctatacgcaatggaaccgccacattccgcgtctggcaatagccacttcacgcaatctgaaagactggacaaagcacggtcccgcttttgccaaagcgtatgacggcaagttcttcaatttaggatgcaagtccggctccattctgaccgaagttgtcaatgggaaacaggtgatcaagaaaatcgacggaaaatacttcatgtattggggagaggaacatgtgtttgccgccacttccgaagatttagtcaactggactccatacgtaaatacggacggctcgctgagaaaactgttttcaccccgtgacggacacttcgacagccagctgacggaatgcggtcctccagctatttatactccaaagggaatcgtacttctgtataatggtaaaaacagtgcaagcagaggcgacaaacgctataccgccaatgtttacgctgccggacaagccctcttcgacgccaatgacccgacccgtttcatcacccgtctcgacgaaccgttcttccgcccgatggatagtttcgaaaagagcgggcagtatgtagacggaacggtgttcatcgaagggatggtttattataaggataaatggtatctgtattatggttgcgcagattccaaggtgggtatggctatctacaatccgaagaaacctgctgccgcagatccgctgccctaaacaaactgtttctttctacccgacataaataaaactgcaaggattacacaattctgaatgaacagaggttgtgctgatccttgcagttcttatatttatcaagattgatgcacaaaaaacatatttcactgccaaaaaagtaaacatttgcgccaaccatgcgaattagccctatctgaaggaccttttcctccacattattactaattttatcactatagaaataacacacaacaaatcaatagttatgaaaatagtacaaaccttttggcatggaaataattcattgttagacaatagttttggatggatgaatccacaataccatttaatgtcatgggcattaagttgtctttctttaaaagacaactatcaaaatatcgttttatataccgattcccatggatatgaaatctttgccgaacaattgaaactaccgtatacagatatcatcattcaatacgacaatctaacttgccctgaacctcattgggcatatcccaagttattaacctattcactccaaaaagaacccttcatacatgtagacggagatgtatatttgcctaataaactagacaacaccatagagatgagtgaattgattgctcagaacaaagaaataggaagcagttattataaaagtatgatgaatcatattctacaaaaagatttattaatgccatccttcctaaaaaaagaattagaaaaagactctatcatgtcatataatgcaggaattatcggaggaaatgacttggagtttatagctgaatactgccggactgcatttaactttatcgaatcaaaccatttaaatgatataaacagcaaagatattcacataaataacaatatcctctttgaacaaatattgttttatgcccagtcaaacagttataacaaacctgtggcaacagtccttgatcacagcgttcgtgacaatggatacatttatgatgatttctgtaatttttatctatacgacaaagccaaactattacatatcatcggcggacataaaaagaaccaacggatttgtgatttacttagcaaaactctattaaataaatatcctgactattacaatagagtagtagaattgttcgcgaataatcataagcgaatgcaaaacaaggctaaaaatactaccttccccgatttgagtgtacaaatgtgtattgcatcctatcaagattatcttcattctttgtccaaaaaatgggaaaagctatcttataccgatctgtatgattgggagaaatgctcatcttcctatttcatgtttctaaatgccggaaaagaggaacaagccatatttactattaatagaaatccctacctatccatttacgaaattccggaaccctggccgacagaagcaaaaaaactgcttaaagaacgtataaacaaagagtgccattcagaccactttgatatagtatgcattccatgtctgctatatgagggttttaaagaagtgcttattaacgatttatgttataatattctgattctcatagaagaagagaagacatttgaatgtctgttcaacgaattgctaccttgtttttcatctgaaatcagcaaagataaagaacaaacttacaaattaattctgacggaagtagaatatcttctttatcatggggtgatatgtatcaattgatttcaacttaaacaagtgtataaacttatctatgcatccaaaagaaacgactttatttataaacactaaaattatcatgtattatggaaaagaaaagtaaagcggagaaattaaaattaagagggatcaaccaaaccatattgatctccagttacaattcaggggcaggtacaggtcccaatgattgcatgacagaagaagtttatcaacggcttaatgcccaaggagccttagataccaccgtctatgtatgtggcattggatggatgacaccggacgtaactatctacggtagcggatcaggtttcggttccggtagtggttccggcagcggtagtggttctggcgagtattggggaagcggacactggggaagtggagattggggaagtggtagcgggtggactggtggaggaactagcggtggaggaactagcggtgatggtccgaaacctggaggtggagacaaacccgttcccaaagatccaatagaattaatggacaaaagtaggtttgttggttggagagaaggagctaattgcttaagtctttgcaaagaaacactaaaaaaatatggattatccaattacggaagtagcttaaatgtttttaagctagttgattctgcaaatggattattaacaaactggggaaatgatccagctcaaaactacaaaaatgcaattgaatgtatcgataaacatctcaatgcaaaacgagttatcatagtaggagttgattatgatctcgatttaaatccaaacatcgacggtacagaccattttattgtagttacaggaagaggatatgatacttcacgacaacagtattactatacatttatggataatgcaacttccaactctgatgatggatgtagcaacattaatcgcctttactacaaaactgaaaatttaaagctagagggaagcacaaaggttgctaacagatattatactgtaactcaagtaagacccaacgacggtgggaaatatgatacaacatctttataatataaaaatgtataacctagaacgaaacgatagagtccacttttaccgtggactctatcatcatctataaataataatcaaccatgaaaaaagtagcaattttaattatattaataatggcaagcggactatctatgtatggccaaaacagctacaaagtcacttctttagtgaagctatcggatataaaagaaaagaacttgcaacgtgtattctatgttttttcaaaaaatgagttcctaaagctacccatcaattatgatatttcattctttgtttaccaagacaacaacagtatctctcgtgatgattttgaacatacgagagcagtaactcaaggtacatcttatagaataagcaattctccattctatgctaatcttgacaaaagagacaagagacctcccattgaaacagttctttctctcattgaagatactaatggaaaatatatcatgggaatagtcagaacttggtcagctcttcacgatatggataaacattggttagttacattcaattttgcaggagcaatcattgactacattcccatttgtgaatggcctggaacatgcagcaaagctagaaccatggaagcacaaatcaataaagattttacggtgaatgttcaacagttgaactttcctgaaaataattacatcattcagttcgatagtataaaaagaaattttatacacctagataacctgaaagggcaacgtatagatactaaatatcagataatgccggatggaaagtttaaaaaactggaagaggcatattatcaaccgcaaatctacactccggacatgttgaagagcaatgaaaccctcattcgatatagaagagaaaatattaaagaaaagaaaatatttcaacaataaagactatgaaaaacagtttaagaatcccacgaattatccaccaaacatggaaaacaaaagatgtaccttctcctcttgaccaactgccacaaacatggaaagaatatctcccgaattgggaatatatcctatggacagatgaaatgaacagggaatttgtctgcaaacatttccctgatttcctggagaagtatgatacatatccttgtaacatacaaagagcagacgctatacgctatcttctcttgaaagtttatggaggattgtacgtagacatggatttcgagtgcctcgaaaatattgagttcttactagaaggatcggattttatcgtaggtaaggaacccgactggcatgctaaacgctttggttttgaatatatcatttgcaacgctttcatggcgtcaacacccgataatgattttatcaactttgtatgccaaaggttaatcaatcattccggtgggaaagttgttaataacggatttgatatactggattccacaggccctttcttgctaacgcatgcattcaacgcatttccacataaagaagacatacgtatcctcgaatcaaagacaatatatcctatcggacaatgggaggtagagaaaataaaaaacaaccagattcctaaagaaatggaagagcgtatcaatcaggctcatgccatacactatttctttggtacctggtttggtaagtaacctttaaaaataaaataaataatgatcccaaagaatatacaccttatctttctacgcaaagatgaaccgttccccgaactattcgagaaatgcaaacaagaaatacaagtcaatcatccggactggaatatccgcctatataataaggatgatgcacaggatatattaaatcaagatttacctgaatacatcgaagcctataatgcattctatcacaatgtacaaaaagcagacttcttaagattagcccttgtatacctctatggaggattctatatggatttagatatgttaagtttaaagccacttgatgagttgagaaagtataatttggttttaggagaagagaaaattgtctgccaggcagagcaagaagccttgaatttaagatatcgacttcgaatagccaactatatgttcggtggaatccctaaacatccttttttacacagaataatggatgaaatggcagaaagagccacaataatcttaaaatcgcaacaggagattttagacataacaggtcccggcctactaacagacacatattgggataactatggaatgtatacagacatcacattattaagaaatacagataaaaggtgcaggcaaccttatcacaatgaaatctcatgccactttggagattatgcagctcatctgcatgccgggacatggagaacgggaatttgagtttatataaccaagttatgcaagaaaagctattttatcaacaaacactaaaagaatcattgtaaatttcttttctacatcaactgcaataaacgtaatgaccgggaaacaaatggagagcatatcatgggagttattaccgcaacatctaaaaaacatgataagataaaatggtcagagagtattgatactggtttgtcattgccgacacctgctgtactttcattgttcacaaacatatattatagaatgataatcagctacttatcttataccctaattatccatagagtactctgaacagacaaaatatatttgcctacatattggcactacaaaggacagctaatcattcgaaatccgctatatttggacacgttttgaatgacaaaaagcttcttgagcaatcattctttatgactgacaagatgcagcccgaaccggacaagaatactttctagatgtaaagtggtgccaaaaaggtaaatatccgtgccatttccataaagaagtactattctaaaccctaatagaattaattccattagttttgtataaatttgtaaactactaaacttgttaaaaataaaccatgatgaacaaaaaagtaattgccgtagccctcgcccttgccttagcaggaggaagctatgcacaagatgacaccgcgaagaaaaaggtgaaagcctatatggtgtcggacgcccacctcgacacccagtggaactgggacatccagacaacaatcaacgaatatgtctggaataccattagtcagaacttatttctgctaaagaaatatcccgaatacgttttcaactttgaagggggagtgaagtatgcgtggatgaaggaatactatcccgaacagtatgaagagatgaaggaattcatcgaggaaggccgctggcatatcgccggaagtagctgggaagcaagtgatgtgttggttccttccgtcgaagcctccatccgtaacatcatgctcggacagacgtactaccggcaagagttcggaaaagaaggaacggatatcttcctgccggactgcttcggattcggatggacgcttcccaccattgccgcacactgcggactgatcggcttctcttcacagaagctggactggcgtaatcatcccttctatggaaagagcaagcatccgtttaccatcggactctggaagggcattgacggcaaacaagtaatgctagcccacggatatgactacggacgcaaatggaacaacgaagatctctcgaagaataaagatctggaaaaattagcccaacgtactccgctcaatacggtctaccgctattatggaacaggggatatcggtggctctcctactctgggttcggtacgttctgtagaacagggaatcaaaggtgatggcccggtagaggtgatcagtgctaccagcgatcagttgttcaaagattatctgccgttcaacaatcacccggaactgccggtatttgacggagagttattgatggatgttcacggaacaggttgctacacttcgcaggcagccatgaagctgtacaaccggcaaaacgaacagttgggcgatgcagcagaaagagcggcggtcgctgccgaatggttgggtactgccagctatccgcaacacacgctgacggaggcatggaaacgtttcatcttccatcaattccatgatgacctgacgggaacgagtatcccccgtgcctatgagttctcatggaacgatgaactgatctctctgaaacaattctcacaagtactgacttcttccgtcaacgccattgccggacagatggatacacgcgtgaaaggaacgcctgtcgttctttataatgcaaacgctttcccggtatcggacttgacagagatcatcctcgaacagcctaaaaccccgaaaggcttcactgtatacaatgcacaaggcaagaaagtcgcttcgcaaatgatcggttacgagaacggacgtgctcacatcctggttgcagcgtcactgcccgcaaacagttatgcagtgtacgatgtccgcaccggaggatctgaaaaaacgatctctccttcagccgcctcagccatcgaaaactccgtctacaaaatcacactggataaaaacggagatatcatctcactgaccgacaagcgcaacaacaaagaactcgtaaaagatggaaaagcgattcgcctggcactcttcaccgaaaacaagtcgtacgcatggcctgcatgggaaatcctgaaagagaccatcgaccgtgaacctgtctccatcacagacggcgcaaagatcactttagtggaaaacggcgcactccgtaaagcactctgcattgagaagaagtatggcaaatcgctcttcaagcaatacatccgcctctacgaaggcagccgtgccgaccgcatagatttctataacgaaatagactggcagtcaacaaacacgctgctgaaagcagagtttcctctgaatatagaaaatgaaaaggctacttacgatctgggaatcggcagcgtggaaagaggcaataatgtacagaccgcttacgaagtatatgcgcagcaatgggcagacctgaccgataagaacaacagctacggtgtatcgatcctaaatgacagtaaatatggctgggataaaccggataacaacacgatccgtctgactcttctccatacaccggaaacaaaaggaaattacgcttatcaggatcaccaggacttcggcttccatacatttacttatagcctcacaggacataacggagcacttgacaaacccgccaccgccatcaaagctgaaattctgaatcagccgatcaaagccttcagcagtccgaaacatgccggaacactaggtaaagaatttgcttttgtacgttcaagcaacgatcaagtcgttatcaaagcgctgaaaaaagcggaagtatccgatgaatatgtagtacgtgtatatgaaacaggaggcgcagctccgcaacaggcagccatcaccttcgccggtgaaatagagaaggcagtacttgcagacggtacggaaaaagagatcggcagtgctgacttcaacaagaaccagctgaatgtatccatcgctccctacagcatacagacatttaaagtgaagctgaagaaaaaagctgatcttcaagctccggcatgcgcttatcttcctttggactatgatcgcagatgtttcagttggaatgctttccgcaaagaagggaacttcgaatcgggcaacagctatgcagcagaacttctccccgactccatcctgaaagctgacggcattcctttccgcttgggagagaaagaaattgccaatggtttgacttgcaaaggcaatgtacttcagttgccaaccggacattcttacaaccgtatctatttcctggcagcctctgccggtgaagatgcagttgctaccttcagcaccggtaacaactcacaggaaatcaccgtaccttcctataccggatttatcggtcagtgggaacatctgggacatacggaaggcttcctgaaagatgcagaaatcgcttatgtcggcactcaccgtcatgcttctgacaaagatgaggcttatgagtttacgtatatgttcaagtttggcatggatattcctaaaggagcgactacggttactttgccggatcatgcagatatcgtattatttgcagcaacgctggttaacgagaagtatccggcagtaactccggcttcggaattgttccgcacagccttgaaagcagacaatggagaagaagcgacgactaaaacaaacctgttgaaacaagccaaactaatcaaatgctccggtgaaaccaatgaaaaagaagttgcaagatatgccgtagacggtgatgtgaagacgaaatggtgtgatacaagcacggctcccaactacattgacttcgacttcggaaaggaacagacgatccgtggatggaagttggtaaatgccggaaatgaaggcagcgtctttatcactcatacctgcttcttacaaggcagaaacagtccggacgaagaatggaaaacgattgatgaactgagtgataacaagaaaaacacggtagttcgccagtttaagccgacttcggtacgttacgtcagactgctggttacacaatctacacaaaacaacagtctgaaggctgcaagaatctacgagttggaggtttattgataaaccgaaaataaaacagaagtaatatctcacaaacaaaaagaaggcgtatcaaaagtcagtagtaactaaactcccctcctacgggtactcctccttcctgaaggaggagggtttagttacttttgacttttgatacgccttcttttttcatctccatatctgtcattgacaataagaaaacgccttcaaatatatgcttccgcaaacacttgaaggcgttcatcatcctaaccaatacctatcctaaaaactattttttacctatttattcaaaacgatcggcctattggcagaagctttaccaaaattcttggcaggctttttgcccatctcaaattttaaagtactgccgttaattatatcatcgtacgtaatataacttttatgataaggtttgccattcagataaaccttctgaatatagatattatctttactattattcggtgcttcaacagtaaacactttaccaccacgcactttcacttctatctttttaaaacgaggactgccgaaagcaaacacaccgtcagacggattcacctgatagaatcccatagcagaaaggagataccatgcagacatttgtccacagtcttcattaccgatgataccgtccggctgatctgtatagaagtcgctcatgatgaaacgaaccttttccgcagttttccactgttcgccggcatatgtatagagataggctatgtgatggctcggctcattgccatgcgcatattgtccgatcagaccggtgatatcactggaagcaccttcacccatactgtcattgttcgtaaagaagctgtcgagcttcgatgtaaacggcttgtcaccgccaaacaggctgatcaatccatacggatcttgcggagcgaagaatgtatattgccatccgttgccctcacagaaatcgccgactccgtgaatagaacgtgccggatcgtacggagtacgccatgaaccgtcttccagtttcggacggatgaaatggatagaagaatcgaaatagttcttatagtaatgggcacgcttcgagaatgtctcataatcagccgtcttccccatcttttgtgccatagcggcgattccccagtcatctactgcatattccatagcgatggaagtagcttcgtggattttatcagcagggatatatcctttggccatcacgtaaggaactccgttctgcccttcataagttgctgtcgctttcatagccgtcaaggcttcttccgcatcaaatccggtaaatcctttcagataagcatctgcaatcaccggaacagagctatatcccggcatacaatttgtttcgccgctcatcaaaggccagataggaagtttatcctgttgccgataaatggaaagcattgaattaattacattgtccaccatttcgggctgaatgatagtcatcagaggattcaaggcgcgataagtatcccaaagggagagagtggtataattcgctttcttcgggtctgtgtaaatcatatcattcatcccccgatactcaccattgacatcacaatacaatgtaggagcgatcatggtatgatagtgtgcggtataaaacacacgtttggcagcctcatcgtctgattctacggtcatcttatccaactgtttgttccagcggtcactgctcatcttcaccaccttgtcgaagtcccagtgagaaagttccgcttgcaggttcatcgctgcattgtcacaacttacggaagaaatagccactttaatctttacttctttcacattgccgaaagtaagcacacttttcaccgattctactttcagttgatcccaaagtttgggggtattatcgtcataagccgtaaatttctcgatcttctgatcgctcttcagcacaaagtatacttttcgcgacgggctccaccctctgacataccgataaccttccactgtatagtcatctactttgcgaatatagctgtcgtatgcattggaaccgtttccttcacgcaggtcaatcagtatagaggccggttttccttcgggataggtataacgatgaaaacctacccggtcagtagctgtcagttcggccttgatattgtatctgtccagaattaaagaataatattccggacgggctatctcattgtcatgtgagtatttcgacgcataaccgtcacgtatatcatcctggttacctctgggagtacggatttcattgagaggcataatcagaatatcccccagatcggtacatcccgtaccgcttaaatgagtatgagaaaaaccaatcagaatactgtcggaataatgatatcccgaacaccagtcccagcctttatgaatattgttgggtccgagttgcaccatgccgtacggaacactcgttccgacaaatacatgcccgtgaaaaccggagccgatataaggatcgacatactgtaacaatccctcactctttgaatagtcctgttttgccactccgctcgttgccagacctaaaaagcaggaagcagccattaaaagtttaaatgcgttcatctgtatttttcttgttaattcgaaattgtttcatggtaggatttacttcatgaattatagttttcatgatgcaaatataaactctatttcgatactatcaggctgtcgccagagtttaccgaatggatggcagggatatttactcttttggcaaaagaaaaaggacttgcactgactaaagcagttcaaatcctttccataaatttccttcgggaagaggagcttcgagctctatcagctcttttgagacgggatggatgaatcgtaccttccgcgcatgcaggcaaatactgccatcgggattggaacgcggagcgccatatttaaggtctcctttaatgggacatcccatttttgccaactggcaacgaatctgatgatgacgtccggttttcaagtctacttcaagcagatagtaattctccgaatgtccgatcagccgataattcagaatcgctttcttgctgttcggcacttctttgtcataagcaaaactcttgttctgcttctcgttacgtgccagataatgcaccaattcaccttccggctctttgggggcattctttactactgcccagtaggtctttttcacttcactggtacggaacatctcgttcagacgggtgagtgccttactcgttttggcaaaaataacaaggccgcttacggggcggtccagccggtgtgtcacaccgatgaaaacatttccgggtttctgatacttctctttcaggtactgcttcacagtttccgaaagcggtgtatcacccgtcttgtctgcctggacaatctcggaagcggtcttgttgactacaattatatggttgtcttcgtatacgacagtcatactgttcgattacatattcataccaccatctacctgaatcacctgacctgatacgtaagaagacatatctgatgccaggaaggtagcgatgtttgccacatcttcaggagtaccgccacgacgcaaaggaattttctttgcccattcagctcttacttcgtcagaaagagcggcagtcatatctgtcaggatgaatcccggagcaatggcgttggcgcggataccacgagagcccaattcttgtgcgatagacttggccaatgcaatcataccggctttggaagcagcatagttagcctgtcccgcattaccgtgaacacctaccacagatgccatattgataatgctaccagctttctgacgcatcatgacaggtgtacaagcgtggataaagttgaacgctgacttcaggttcacattgattaccatatcccattgttgttcgctcatacgcatcatcagcccgtcgcgagtgataccggcgttgttcaccagaatatcgatacgtccgaagtccttatggatttcttctacgacctttgcagtatcttcaaagttagcagcgttagaagcataacctttggctttcacccccattgcttccagttctacccttgttttttctgcattttcgtcaatgaccaggtcagtaaatgcaatgtttgcaccttcggcagcaaacttcagagcgatagccttaccaataccacgggcggcaccggttacaatggctgtttttccgtctaataatcccatactaaaagttatttaattaaatttctgttctatgcagtgcgccaaacacaatgttggacacatatttatttcttgtttcttcgtccaaatgagctcctatatgcccacggatataaggaacttcaattcccttcacacagtaatgtatcaaatcggcagtcatctccacatcatcaatgtgaaacactcctttcgcctgaccttccaaaagaacagtcttaaaaatctggatttctttcgcatcaaatttctttcgcactttttctacccgccatatatcacggaagaaataagcacgcagggttccattccgataaacgacctcctttactgcatccaatcgggtatatatcagttccaacagtttgtcgtccggcgaaatgtttttatcagccaccctcttcatcatatccgacaagatatccaattccgattctacaacagccaaatagatttcatccttacttttaaaataggtataaagcgttcttctaccttttttcgaagcgagggcgatatcgttcattgtagtgttctccacccccatctttgcgaaaagctggcgggcaacgtctactaacttggctttcgtttttgatacggtcataggttatacaaattgcacattgctgaatattttgagcaaaagtaattcttttctttagaccacacaagaaaacgcacagaatattaacatttgtatattaataggtactaaaaaaaagttccatcaatacttctctcattttcagcacaatatagataacacaatcttttttctaaaaaataattggagaataatttgttttattcaagaaaagccgtacctttgcacccgttaaacatcgcggagtggagcagttggtagctcgttgggctcataacccaaaggtcattcgttcgagtcggatctccgcaacttactaaagaatcgcttttcaagcggttctttttttatctctctccggttagattccactgtttacagttcgtttattcacaatcccaattttatatcaaccacgttatcaacaaagttattaacaggttaattaattaataacaaacaaattaaccatataagagactcatttttaaacaagcaggatgtgacttgttcacaacctcaagaagcaaaataagaatcacctgaatacaaaaaaaagatactacctcaaaaatcagtagtatctccttaattcttcttccgaaaggaagtacatccattcattacaatctatattacccttgtcttttttgccggttctgacgcccttctttcatctgtttctcacgttcagcctgttttttcacatagctatcgtattgttctttagtcataatcttcttcaactgggcatcataatcttcacgggacttcttcatttccgccatcttcttttcccgctcttccttagtcatcttggcagccttattatctttcgaacgtccgccctgattagcagccatcttttgcacccatgcaaggttgacatcctgtaattgttgcttttgatcttcattcaaagagtattctttcaccatacgctctgtcatacgttccgcgcgggttttcggatccatctgttgtcttccaccctggcgatttccttgtgccattgccacaccactcatcagtagcaaagctaccatccaaaatacgattcttttcatttcttttttcttttatagttaatctgataataaaccgattgcatcattgcaatattatatttgaccagattaaaacggaaaggttaaatcacatcgaggagattaacaataaataactttatgtttattcttcccgaccgaacgagcggtattcaagcggagtaagcccggtacgttttttgaaaaaggagaaaaaatattcggtagactggaagcccagaaaaaaagaaatttcttttactgactgggaagttcccaccaacatttgcttggctttacgaagtttcagttcctgaaaatatttggcgggtgcatagccggtatattccttaaaaaccctgcggaaccatgagtaactgatattcagcctcatcgccagttcctccggatcaatattgccggatacattttcattcataagtatctttgcctgctcgatcttctgatcgacatcactcatctcgaagaccttattcttggaaatcgaaagaatcataccaatcatgtgaagtacgattccggaaaggtattgctgggcagatattttatccgcttctgccacttccaaagcgcgggaaaacaaagataccagttcttcattaataccgacttccaatatctgtctttcctgagaaagaaaggcatcgcccacaatcgtatcaatcgccggaccttcaaaaccaatgtaatattccgtccatccggtctgccgcaatggataataagtatgccactgtccgggaaacaacaccatcagccgacctttacaaacttgtctttcaggagtagaatcggaagaaaacaaaccgcgcccttttgtaatatagaccaattgatattcccgcaatactcttcctttttcggcattgaaatagtaaccggacggatgctccttcagcggataaggagaatcgggagggatagactgatagccaaccgtattcacccacagaccgaatttgcggtccatgtcattaactatcaagtatttaaattctaatcccagattattatcctcagtcatacaggcgtgttttcatacaattgaattgaacaaaagtaggaattattttcaaaaaacacacgctaaacagtaaaaaaacatccggagcacctgtccagatcctccggatgcttataaaaaacaaaccttatacaattaaaatcagaatgctttccgatataatacttcaatctccgctactgacgtaggacgcggattaccacctgtgcaaacgtcattgaatgcagccaccgccaatgccggaatatcctcttccttcacattgatttcatgcaatttctgtgggataccgatactcagagaaagcgctttcactgcctcgatagccgccttcacaccttcagcttctgtcataccgtctgtattgacgcccatcgccttggcaatatggatatatttcggagcagccggagactcagcattgtactccatgacataaggtaacaacagcgcattggcaacgccgtgaggagtatcatagaaagcgcccaacgggtgagccatggaatgtacgattcccaaacctacattggagaatcccatgccggcaatatattgagcctgcgacattgcttcgcgggcaactgtgtctttaccgttatctaccgccgctttcaagttctgagcaatcatttcaatcgctttcagttcgaacatatcgctcatagcccatgcacccggagttatataactttcgatggcgtgagtcagcgcgtccatacctgtagcggcagtcagtcctttcggcatggaatacatcagttccggatctacaatagctacagcagggatatcgttcgggtctacacataccattttcttgcgtgcatcttcgtcgataatcacataattgatagtcacttcagcagcagttccggcagtagtaggcaatgcaaaggtaggaacagccttatgtttggtatcagccacaccttccagagatttcacatcggcaaaatccgggttattcacaacaataccaatcccctttgccgtgtcgatagaagaaccaccacccaaagctacgataaagtctgcaccggaagccttataggcagccacaccattctgcacattagcaatggtagggttagcctttacatcactataaagttcatacggaatatgattgtcatcaaatactttaatgatttcggccgcaacaccaaatttgataaggtctttatctgttacgaaaaaggctttcttaaagccacgtctggctgcttccacagcaattacactccggcatcctgcaccgaaataagaggtctcattcagaataatgcgattcatagttgtgtcataattttaaagttaccgcaacattctccatcgatagaaaatgctgcggtcgctaaagtagataaattcagtgattaatacaagtattatttaggaagattgaaagcaacggacatttctttcatttgttcctgactcataccatccggttcgaagcccatattcttcgcagcaatatagatcagcgccgacttattcagcacgtcaatctgatcaaaagcctgcatagcatcgcagtctacggcaaaaacaccgtgtttttcccacatgactacatcatagtcctgcaattccttgatagtggcttccgccaactctaccgaactaggcaatttataaggaatgatacctagacctctcggacagaacgccttcgtttcgggaatcatactccataacagattggttgccacatctttctgaaggaacttctcgcaatgagtcatggcaatcagttcgatcgggtgagtatggacagatgctttataaggagaattcttgctcagcaaatcattgtgtacgctcaggtgggaaggcagttccgaagtcggtgccaccgcttcgtcggcaatgatcacatagctggcgcaatcatccagaatgcggatcaccgaaccattttccatcggccagcgagccagatcacgcatgcgtttgttagttcctttgcaataaaagtaacatcctttcagataaggcaatgtaacgccaatggattttacttcgctgatcggttccatccgacggatttcatcgtctacaaactctgtgatatttacggtgatattaccaccgttacgttcagcccatcctttttgccacaagtatccggcaacttcagctaccttgtttacttctttggcaagtgccggacgattttctaaaattgatttcatatctatttattattaaaacaagttcgggaataccagcgagaagatcaagactaccaaaccacagatcaacactgtgattgttttggcagatactcctttccactctttcaggatgattccccatacattactaaaggttacgttcagcgccatcaggatacaccatgagaaagccagcaacacgggactttccgtgaggaagctcttacccatttccaatccgaagaactgcatataccacagcacaccggccaacgcacagaagacgagattgttaccccatacctttcctttggcatagtcaccgacagacttattagctatattctgctgcaggcagtaagcggcatttgtcatgaatccgcctaaagtcacgaggaagataacaggaagacctgcataaagtccatccacaccacctgccaaagcagcttccttgataggagttccggcatccaatcccaaagcaaagcaggcactcatcacacccgcaagaagtgctaccagcaaaccttttgtcaatgcaaagtcttttacggcagcccgtttttcttcttcgctcatattctgtgcacgcaagccaccggcataaccaatgatagcaatacccgccagcgtaatacaaactcctagaagaagaattagtccgttaccttcgaacagattggttccggcgaagatggcaggaaaaagggttccgaatccggcacaagtacctaatgcaatactttgtccaagcgcaacacccagataacgcatggagagtccgaaagtcaatccgcctattccccataatacaccataaaagatgctcattccagcacctccggctccccacaagtcgaacaaactgcctcctgcgggtatccccagcagtgatcccaggaacgggaacactaaccaggcaaacacaccttgtactaaccagaagctttcccagctccattccttcacctttttaataggtacataggaactggactggcaaaagctaccgatggctataatcaacaagcctattagaatatccatcacttatcgtttagaagttacttccgcttcgtacttttcgatttctgcaatgaaatcttcgcctaccggaacgttgttcttcaagcagaacatatcccatactgcattccatggaagcgctttctcttcttcgagcagagccagacgctggaatccctgtccgttagcttcgtattcacgcagcttggcaatcggttcgagcaaagcgcgtgtcatacatttctgagcagcacggctaccgataacgtaagcaccgatacggttgatagaagcatcgaaatagtcgagaccgtagtgtacgcgttccaacgcaccgcaacgaacaatttcactgaacagttccattgtaggatcatccataatggttacgtggtcggaatcccaacgaaccggacggcttacgtgcagcatcaattcgggcacataaagcaaaagagaagatactttgtcggcaacactttcagtcggatggaaatgaccggtatccaaagttaccatcttattacgggatgcgccataaccgatgtagaagtcattggaacctactgtatagctttccagaccgataccgaatacttttgattcaatacagtctttcatgtttttatattcagtagcaaatatctgatccagagaatctttcaacaatgcacgatatttcatgcggtttacagtgatatccttgcttccgtcatgtacccaaagattcatgatacacgggtcaccctgcgccttacccatttcttcggcaacggcacgacaacgtttggtatgctcaatccagaactgacggatgccctcatccggattagacagtgacaaatcgccagatttcggatgtgagaatgaagtagagttgaaatcgagtttcatgttatgctctttaccccattcaatccagctcttgaaatgttcaggctctacctgatcgcggtctaccactttaccttgaaaatccccgtagatttcgtgcagattcaaacggtgtgtacccggaatataagaagcggctttcagaatgtcggcacgcagttcatcaatattgcgagctttgcccggataattaccggttgcctgaatacctccgctcagtgcacctgcctgcacttcaaaacctgttacatcatcagcctgccagcaatgaagtgacaagtggaagtcctgcatggttttcagtaccttttcagtatctacacctactgctgcatagcgttcaacagcaatctcatacgctttctgaatcatttcttcttttttcatgatattctattattaaaagttaatattattctgtcggttatttcttgattctccggaatttatcgaacgcagtttttaaaatggatataagccgcatcccaggctgccatatcctgtgggtgataagtcttcaacggaattgaacggcttatcaactgacgcataccggcaacatccgtcgcctctcccatcgtcattgcctgaatcatgacattaccgatagctgttgcctcagacggtcctgccacaaccgagatgccgatagcattagcagtaaactgattcaacaagtcattacggctacctccaccaatcacatgcagagtttcgataggacgaggagaaagcgcacgcaagttctccaacacctgacggtaacgcaaagccagactctcaaagatacaacgtactatttgtccacgttgctcaggaaccggctgcccagtagtccggcaatattcacgaatggcctgttccatatccgcaggatttgcaaaacagtcgtcatccggattgattaaactacggaatggttcacacgaatccgcttcggttattaattccggatagctcgtatctccccaattcagacggcaacgttccagcaaccacattccacaaatattcttcaaaaggcgaattgtgccttctacgccaccttcattcgtaaagttcaaagcctctgtttcagcagtgattaccggtgcatctgtttccacccccatcagcgaccaagtaccgctactcaaatatgcgaaattacgatcaagtgcgggaacagctgctacagcagatccggtatcatgtccggccaccgcaatcacaggaattgcccccaatcctgttatcttttgcacttcttcagtcaatgttcctatcttctcacccgggaagacaaaacgaccgaaattctcttcttgcagtccgactgctttcagcaactccggttccagacgttgcgtatgtgcattcactaattgggcagtggaagcaatggtatattcggttaccatcttcccggtcagcatatagctcaacgcatccggcataaacagaactttgtctgctgcctccaatgcactgtcatgattgcgacgcaaagtatctaattggaaaagtgaattaaaattcattacctgaataccagttttaccatatacctcgctacgagagatacgagagaaaaaggcttccggtgctcctaccgtatgcggatcacgatatgcataaggctggcgaagcaggtttccatcttttccaaggaggacgaaatctactccccatgtatctataccgatagaggcaatagattctccacggtgagctaccaatttcaatccgtcgataatgtgacggtataatgcataaatatcccaatagaaatgtccacccacctcgatcaagtggttaggaaaacgattaatctcctccagatttaatccgccttcaataaaagagcctaagattgtacggccgcttgttgcgcccaggtcgactgcaaaaaagttctgtttcatggtattttgtctatatatttaaggtatccatttacctacattgcaaagataggcggttccttcctccttttccttacgcattttgatagaaaggatgtgcattttgacacaaatctgcatagccaaaccttacatcagtataaattttactttttatgcaaaaaaagcatgatttatgcatgttttctccgaaataatgcataattttgcgccattcttagaataattatacaatgaagaagaaagcaaatcggttagacgccatcaaaatgattatctcaagcaaggaggtaggctcgcaggaagaactactgcaagagctgaaccgtgaaggcttcgaactgacacaagccaccctctcccgcgacttgaaacaactgaaagtagccaaagctgcaagtatgaacggcaagtatgtatatgtattgccgaataacatcatgtataaacgttccactgaccagagtgccggtgagatgttgcgcaacaatggatttatctccctacagttttccggcaatatagctgttatccgtacccgtcccggttacgccagcagcatggcttatgatatcgacaacaatgagttcaacgagattctgggaaccattgccggcgacgataccatcatgctggttctgcgtgaaggagtagccacaagcaaagtacgtcagcttttgtcgctcatcattccgaatatcgaataactatacctatattatatataaagaaatggacactcaacaaatagatgttatggtagccgacgcctcacatgaggtttacgttgacactattttggaaactatcagaaatgctgctgccgtacgaggaaccggaatcgcagagcgcacacacgaatacgtagcgactaaaatgaaagagggcaaagcaataatcgcgctctgtggcgacacattcgcaggtttcacctatatcgaatcatggggaaacaagcaatacgtagcaacctccggtctgattgtacatcccgattttcgcggattaggattggcaaagcgcatcaaacaagcatctttccaactggcacgtctccgatggccgaaagctaagattttcagtctgacatccggagccgcagtgatgaaaatgaacaccgaactaggatatgtccccgtcactttcaatgaactgacagacgacgaggctttctggaaaggatgcgaaggctgcaccaaccacgatatactggtagctaaaaaccgtaagttctgcatctgcacagccatgctgtacgatccgacagacccgcggaacataaaaaaagaacaagaaagaaataacatttaatatatacagcactatggaagaaaagaagaaaaaagtagtggtggcattcagcggcggactggacacatcgttcaccgtcatgtacctcgctaaagaaaaaggttacgaagtatatgcagcttgtgccaatacgggcggtttcagcgaagaacagctgaagacaaacgaagaaaacgcctacaaactgggagcagtgaaatatgtaacattggacgttactcaggaatactacgaaaagagtctgaaatatatggttttcggaaatgtgctgcgtaatggtacttacccgatctctgtcagctcggaacgtatcttccaggcattggccatcgcacgttatgccaacgaaatcggtgcggatgccattgcccacggttctaccggagcaggtaacgaccagattcgttttgacatgactttccttgtactggctccgaatgtagaaatcatcacgctgacccgtgatatggcattaagccgtcaggaagaaatcgactatctgaacaaacatggtttcagtgcagactttaccaagctgaaatactcttataacgtaggtttgtggggtacatccatctgtggtggcgaaatcctcgactccgcacagggattaccggaaacagcctacctgaaacacgtggaaaaagaaggcagcgaacaactccgtctcactttcgaaaagggagaactgaaagctgtcaatgacgaaacattcgatgatccgatccaagctatccagaaggtagaagagatcggtgccgcatacggtatcggacgtgatatgcacgtgggcgatacgattatcggcatcaaaggccgtgtgggtttcgaggctgccgctccgatgttgattatcggtgctcaccgcttcctcgaaaaatacacattgagcaaatggcagcaatactggaaagatcaggtggccaactggtacggaatgttcctccacgaaagccagtatctcgaaccggtgatgcgtgacatcgaagccatgcttcaggaaagccagcgtaacgttaacggtacggcaatcctcgagctccgcccgctttctttctctaccgtcggtgtagaatcggaagacgacctcgtgaaaacgaagttcggcgaatatggtgaaatgcagaagggctggacagccgaagatgctaagggctttattaaggtaacttctactccgctgcgtgtttactacaataaccataaagacgaagagatatgattaaagcaggaatcattggtggcgcaggatatacagcaggcgaattaatccgtctgctgctcaaccatccggaaactgaaatcgtattcatcaacagcagcagtaatgccggaaaccgaatcaccgacgtacacgaaggactatacggagaaaccgacctgagatttaccgaccagttacctctggacgcaatagatgtactattcttctgtaccgcccacggtgacacgaagaaattcatggaaagccacaacgtgccggaagatttgaaaatcatcgacctctcgatggattatcgcatcaagagtgacgatcatgacttcatctacggtctgccggaactgaaccgtcgtgctacctgtacggcgaagcacgtagccaaccccggttgttttgctacctgcatccagttaggtttgcttccgctagccaagaatctgatgttgacaggcgatgtttcggtcaatgccatcaccggaagtaccggtgccggcgtgaagcccggtgctaccagtcatttcagttggcgtaacaataacatcagcatatacaaggccttcgatcatcagcacgtgccggaaatcaagcaatcactgaagcagttgcagaacagcttcgattcagagatcgactttattccttatcggggagatttcccgcgcggcatctttgccactcttgtcgtaaaaacgaaagttgcactcgaagaaatcgttcgcatgtatgaggaatattatgcaaaagactccttcgtgcatattgtagataagaatatagacttgaaacaagtcgtaaataccaataaatgtctgatacatctggagaaacatggtgacaaattactgattatctcctgtatcgacaacttgctgaagggtgccagcggacaagcagttcataacatgaacctgatgttcaacctggaagaaaccgtaggattacggctgaaaccttccgctttctaaaaacagaagaattatgaaattattcgacgtatatcctttatatgacatcaatatagtcaaaggacaaggctgtaaggtatgggatgagaacggtacggaatatctggacctctacggaggccatgccgtcatctccatcggacacgcgcatccccactatgtggagatgatcagcaatcaggtagcaacccttggtttctattcaaactcggtgatcaataagctgcagcaacaagtagccgaacgattgggaaagatttccggttatgaagactactcgctgtttctgatcaacagcggagccgaagccaatgaaaacgcgctgaagctggcttctttctataacggacgcaccaaagtcatttctttcagcaaagccttccacggacgtacatcccttgcagtggaggctacgaacaaccccaccatcattgctccgatcaacaacaacggtcatgtgacctatctccctctgaatgacatcgaagcgatgaagcaggaactggcgaaaggtgacgtatgcgctgttatcatcgaaggaatacaaggagtgggcggtatcaaaataccgactaccgaatttatgcaggaacttcgcaaggtttgtaccgaaaccggaacgattctgattctggacgaaatccagagtggatacggccgtagcggaaaattctttgcccatcaatacaaccatatccagccggacatcatcaccgtagccaaaggcatcggaaacggattcccgatggcagctgtactgatcagcccgatgttcaagcccgtctacggacaactgggaactacattcggcggaaatcacctggcctgctcggcagcccttgccgtaatggacgtcatcgaacaggacaatctggtagaaaacgcaaaggcagtcggtgactacctgctggaagaactcaagaaattcccgcaaatcaaagaagtgcgcggacgcggactgatgatcggactcgaatttgaagaaccgatcaaggaattgcgcagccgcctcatctacgacgaacacgtatttacgggagccagcggaacgaatgtactccgtttattaccccctctctgcctcagcatggaggaagcggacgagttccttgcccgtttcaaaagagtactctaactgatatttgattaataaacagcgaacaaaaagcagcctcgaacagaaaaacagttcttattcaggctgctttttgttttttcgcaatttaccgttacctttgtctgtaagaatacattaaaaaagaagcgcatatgaaaatagctattatcggtgcaggaaacatgggtggttctatagcccgcggcctggcaaaaggaagtctgatagcagactcagatatcattgtatccaaccccagcgcaggcaaactggagaaactgaaagaagaatttccgggcatttccaccactctgagcaatacagaagcggcaacgggagcggatgttgtcattctcgccgtgaagccctggtttgtggagtccgtcatgcgcgagctgaagctgaagagcaaacagacgctcgtatccgtagcggctggtatcagttttgaagaactcgcacactttgtgatagctccggagatgccgatgttccgcctgattccgaacactgccatcagcgaactggaaagtatgacgcttatcgcggcacgcaacacgaacgatgaacagaaccagtttatgctccgtctgttcaacgaaatgggaatggccatgctcatccccgaagataagatagccgccaccacggcactgacttcctgcggcatcgcttacgtattgaaatacatccaggcagccatgcaggccggcatcgaaatgggcatccgtcccaaagatgcgatggaaatggtggcccagtccgtcaagggagccgccgcattaattctgaacaatgacacccaccccagcgtagaaatcgacaaagtgactactccgggcggaattacgatcaagggaatcaacgaactggaacacaacggatttacctccgccgtcatcaaagcgatgaaagcatccaaataataccgcaaaattattaataatcaaaaaacaaccacttgtatgaatgaccaaattaaacagatcgcagaacgccttcgcggattacgtgacgtactggaactaacgtctgaagatatcgcccgcgactgcgacatatctgccgaagaataccggctcgcagagacaggacaatacgacatttccgttagtatgctacaaaagatagcccgtacctataacatcgcactggatactttgatgtttggcgaagagccgaaaatgagcagctacttcgtgacccgtgccggcaaaggagtcagcatcgaacgtaccagggcttacaaataccagtcactggcgtcgggcttcatgaaccgcaccgccgatcctttcatcgtcacggtcgaaccgaagggagacgatgagccgatccattataaccaccacaacggacaggaattcaatctggtggttgaaggccgtatgcttatcaacatcgagggcaaggaaatcatcctgaaccaaggagacagtatttattttaattcaaaacttccacatggcatgaaagcgctcgatggcaaaacggtacgttttctggccgtaattatgtaataacgttatggtagaaagatttttagcacagactagctttgcctcacaagaggatttcatcaagaacctgaaaataaacgtaccggagaatttcaacttcggctacgatgtagtagacgcctgggctgccgaacaacccgacaagaacgctctgctctggaccaatgaccagggcgaaagccgtcagttctcctttgccgatatgaaacgctatacggacatgacggcctcttacttccagagcctcggcatcggtcgcggagacatggtgatgctgattctgaagcgccgctatgagttctggtacagcaccatcgccctgcataagctgggagcaacggtaatccccgccactcacctgctgacaaagaaggatattatctatcgctgcaacgctgccgacatcaaaatgattgtggctgccggcgaaggaatcatactgcaacacatcaaagatgctcttcccgagtgtccgagcgtggaaaagctggtcagtgtaggtccggaagttccggaaggattcgaagatttccatcagggaatcgataacgctgcccctttcatccgcccgagacatgccaatacgaatgacgacatctcactgatgtacttcacttccggcactaccggcgaacctaaaatggtagcacatgactttacgtatccgttaggccatatcgttacaggtagcttctggcacaatctggacgaaaacagcctccacctcaccatcgccgataccggctggggaaaagccgtatggggaaaactctacggacaatggattgccggagccaacatcttcgtctatgaccacgaaaagttcacgcctgcagctattctagaaaagatacaggagtatcaggtgacttccctttgcgcacctccaaccatcttccgctttctgattcatgaagacctgactaaatatgacttgtcttcactgcggtactgcaccattgccggagaagcgctgaaccctgccgtattcgaaacgttcaagaaactgacaggcatcaagctgatggaaggtttcggacagacggagacgacactgacagttgccaccatgccttggatggaaccgaaaccgggaagcatgggactgcccaatccgcagtatgacgtagacctgatcgacagtgaaggccgctccgtggaagccggagagcaaggacaaattgtgatccgtaccagcaaaggcaaacctctaggacttttcaaagagtactatcgggatgcggaacgtacacacgaggcttggcacgacggcatttactacacaggtgatgtagcgtggaaagacgaagacggatacctttggtttgtaggacgtgcagacgacgtaatcaagagttccggttaccgtatcggcccgttcgaagtggaaagcgctttgatgacgcaccctgccgtcatagaatgtgccatcaccggagtacccgatgagattcgcggacaggtagtaaaagcaactatcgtattgtccaaagactataaagcacgtgccggagaagaactgatcaaggaattgcagaaccacgtcaagaaggtgactgctccttataaatatccgcgtgtgattgagttcgttgacgaactgcccaagactatcagcggcaagattcgtcgcgtggagattcgcgagaacgatgagaaataaggcataaaacccatttatcaaaaagccggctgtaatcctttgcagccggcttttcttttcactatctgtaagtatcggattctctaatcaattgataaagctccgaccatccgcttaatcattaggatgatagaaattgtattgttcactccatgcaggagttccggcaagcgttatatcattaccgttcggactattatccttcaatacatttccttctccttcatcacacttccaatacccaatcaaaccatccgaatctccggatatctggcgtgacattccttcctgaatggcgttctctgtcaggcatttgctccaaagacgaatctgagcaagttctacctgcacgcgccaaccaaagctctgcgctaaagatattgtattgaatgtaaaatctctagagtctgtcttactggcgtttattgtaccatctttataaagacgaatagtagatccatcataagtataagtaatatgataccatgtatcaggccaccagaattcttcactatcaaaataatttccatctaattgacactgaagaacaggagctatttgtttaacgccctgcggccaataacgtaacaatataccattaaaagaaagaggagctacattgccgggaaacatcatttccctgaacgacttattagcaagtcccacccaatttccagtcggtctgccggttatattgtcgaatctgatccaatattctatagtccattgagtaacaggaatctcattttgaaacttcaaactggttttattacctgatttcagaatcactgctttttgcttattaggggaagtaagcagataaagaatatggtttgcattaccaacaagtcctatcggaccggttacggaagtaatccgtaccggaatcgcataagcctcgttattgggggtggtaaacggctttatagtaagattaatgactggtgcagacacttcgcctgcgggaatcgtaactgtgcgttcaaaacttctgaattcttccggcaaaagttcgtaagacgcttcatgctgttgattatactcatcaatgagttgctgatcgatatccagtgttacagttacatcttgatcaatagcacgaaccaaacggacggtcaatgtctttatcacatctccctcgtccaccaattgtgcctctatctgctgaccaaacgtattggaaggagcagcttctgcaatatatatcccattatcaatagttgacaattttgcgtcgtcgcatccggtgacagccaataacgctgctccgagtacaacatatctggtaaatttaatcatcttcataattatcctttttagttatgttcttgcaattaatgattagcgggattcaaaacctgaataacctcacgcataaagaaatagtcattcaccggacgacaaagattaaagcgataggcgcccactccgccaatgcgggcatccactcccggacgatagtacatcgccattcctttcaatgaataagtcacaataccgtcccgagttgtaaattctggtcctccatcgcttttatgcttctcaaagtcctcacaccacactgttttgctaagaatcgtagcctcatcctctatcgaaccgaatttatttaataacctttcaaaacgaccgtccaaagcatcactatatccttcatccgacctacagtaataagcctgaaccacataataatctaataaaggacccgactccttgtttagtgtctgtggttctccgtcgaccatcaatatgcgtcctgttcctgatttcggtccgaattctttcgataattcatccaaaagaatatgcatacggtccgagtttccacttagattaccggaataaccaaaattcggctcgaagtcaatatcaaacccatcatagttatacttattgattgagtcaataattactcgcgcatatttacggatcgctttttcttgtccttcttccgaggtgtcaccataattgccataccaaccccaataagcagccattgcctcttcctttgagttatattgtacgccatcaacgataaaatcattctcaacagaagcgggcgtatgacttctgcctatatctgtgatatgttgacagtataaaactctgagacctttcttctccctcacttccttaagatcactcttttgtgcttcagtcagattgaaagcccctccccaaagagaaatgatatccattgaatcaggaattcccctcaactggttgttcatattcgttccagctccggtccattcactgtaccagccaaaaacaatcggatgatcggatttcttatattctctcagtgccttataatagtcttcaccattgatattcaccggttcggtgaacttcggttccatttcagtccagtcgctgcactgtataaaaaacagtgcacccattactcccaatatgatatataataatttcttcatatcttaattcctaatttaagctattaataagtaccattctctttcattgcccaccaaaggtcagttccattagaatcttttccattgctaagcatgctgacggccgcttccacattcgccttattgttattgtattcactccgtgtaaaacgaaggcgacgttgtccacgccccgtattacaatcggcattcatggattcagttgccgggaagattctgggatagcctgtgcgacggaaatctgcccatccgttcattgggtcgggataacaggcaatccatttctgggtaagtaccctttccagtttcttcgcatcatcagttccctcctcccacttgatcgtaatggtcgactggttagtataattatttccggtatgtccggcaattaaattatccacataatttcccggcacagatgttgcatcagccagataatcatcggcccccgacactccgaattcctcaaaagacaatctgactcccttctcatagaaagtcttggcatctccacccatattccagcctttcagtgctccttccgcacgcaggaaagcagcttcggcagcgtacattacgggttgtggcaaagttttgtcggtagcgataaaaagtttgctatagttggcgtataccgtaggttcaggtatttctgccgaccccgaacgaacacctacatacccaccggcagcagtctgggtctgtggagtaaaataagcaggacggcgaggatcgttatatccattcatgtacgacacaaggcaagcattggctcttacctcaggccatccgctgacaatagcatatccgttttcattgattccaccattagtcgtatcataagaactatcgcccacactttccatcacaccgccaagtacagcttcctcagccttagtctgagcatattccggttctactcctgatatccggatagccattcgaagcttcagtgtattggcaaacttcaaccactttgagcagtctcctttataaaactgatctaccacagccaaatcctgattcactccgaatgtagccgctgacttcagaatagtgatcgcattatcaagatcatcaaacatggcatgccatacagtctgttcattgtcataaggtgcttccgtatcaccagctttcatctgtgtgtaaggaatgggaccttgtagagaagtaagtaattgcataccataaacacgggtcaactgagccatagcgtaaatgacacctttcttttccgtggagttttcaactagaaagaaagaaggatagatataaccataaagtcttccccatgaactatcattatgtttttcagaagcattataataagcaaaaacattttttccaaagctccagttagcagtcgcagttacctgaccactaaaactagcccacatacagtttatctcctgacaagcattttgttgtggacaagcatatacgttaaacatcgtagacagtaagttgcttgccggtacctttgaaggctggtaaggattagtattaaaatcatcaaaattagtagtacaccccgccatcatacatacgattgcacttgccccgatatattttattattttgttcatacctattttattatttaaaactgaaatttaatgttgaatccgaagtttcttgtacttgggagcatataggcatcaaatccttgatagaagttagatgcagccgaagtggtcagctccggatcgaaaggagccttacaataaatcatccataaattctttcctaccagaccaacagtcattccaactttattgtcaaaccactttttaggcaatgtatagctaagtgagagttcaccgagtcgtacattcgtagcactatacgtataataagccgctgtgccttgaatcgcttgataataagtctgtgcagagactttaccctgatttatctgcacacctcctgcatcacgtacatccgcactgaccttggaaactccggcagcgtcaagtacagattgcgtctcactaatgacaatacctccgaaacgtccggtgaaagtcataccgagattaactcccttataaccgaacccaagactccagcccatattcatcttaggcaagatagatcccagatatgtttctttgttctccatagtcagtccgacaccttcctcattgagaatgtaaccattcaagtcacgtttgagcaggcgttgtccgtatacatctcccattgatcctccgacacgtaaaatcaagcgggcatccgtatgtccataagtaagcggagacagctccggcatctggatagattgtccggtagcatagttgtacacaccgtcagctaaccgttttacccgattcttattccatgtcaatgtataattcgtattgaaagagaaatctttccactgcttattatagcccaatgccatttctataccttcattcataatatttccactctggataggaatattagaatatcccgaagaaagcgacaagtccgcatagaatgtctgattatatgtattggaacggtaataagtcaggttaagactgatatcattaagaattcgtgcgtccaaaccaacttcccatgacttggtacgttccggtttcaatttcgtgttcggataagaagatgtactagtccaattctgggtctgttcatcataaggataagtaacggtagtcatgaagcggccgtaagagttacctacttcagtgtacgaaccacgaaccttcaggtatgtcagccaatcaggagcattaaacatactcgtcagaatggcagaaagtcctactgacgggtaaaagaaagacttgtaatcggagaaagccagtctggaatcccagtcattacgtccggtagcagtcagatagatcatcgatttccaaccaatttccgcattggcaaagatagcgcgtgtctgatcgtgccagccggactgttttgctttccatgctttattgaaatcgatattgtggacagcaaagaaattgataagtttcaatccgccctcatatcctatcatttcataacggctgtcgctcagtgacacaccaaggttgacattgaccgaccagtcattaaaactcttattcagtgtagcaatcgcatccgcatacgtattctttgattgcgaagatgtgtcagcatatgttccacgactaccggatgccaaactgctagtagaagcgtatgccttataagtactacgattatcataattatctattttcacacgtcctaccacatccagccagtcgaacaactgatatttgagggaagcgttgatcatataacgggtcttcttattctcccgcaactggcgattctgtatccagtaggggttggcaagaccacttgaagtaccgccgtaaggccagtattgctccatcaggtccataccggaattataacgttcgaacatacgtacatcatcgaaattctcactacgagggaaacggtaaagtcccggcagaggattatagtaataaccctgcgacatcatattcttgtcattctgaagaatataactggcaccggcatcgagtgtcatcttgtctttcaggaaactggtcgtgttacggacagtgaaattatagcggttgtatccactgttgggcaatatattggtggtgttggtagtagaagccgacaaatacgcctgattcttcttgttaccggttgacaaagcaaatgagttaatgacattcgctccggtctggaagaagtcacgcggatcgtagtcactgtttacaatcgatccccagctatccaggctgttgggcaggttaccatatttgctctgcatctcaggcatcattgacaccttcgagaaagtagtattattggagaccgtgacagaagtcttgtccgcagaccccttcttggtggttatcagcacaacaccggcagcggcagcattaccatacagagctgcggcagaaggtccggtcagcatagagatagattcgatgtcttccgggttaatgtcggcagcgccatccgtaccctgctggtcatagataccaccgccacctccattcatcatgttatacatcggtacaccgtcgatcacataaagcgccagattggaagaagtgatagatttgacaccacgcatcacgacacgcgaagcacctcccgtggtattggacgaattaatattaacaccggccaccttaccattcagagaagagatgaagttcgcatctttcacagtagtcagttcatcaccgctcagctgctgcacgttgtatgacaatgccttctccgagcgtttgatacccaatgccgtcactaccacctcattcagttcctgcgtcgcatcttccagcaccacattggcaacatttccttttacgggtacttcttttgactgataacctacataggaaaatacaagaacaggattcgccgatgaagtggaaagcttatagtttccatccatatcggtgatggttccctcaccggaactcttctcccggatagagacaccaatcaacggctctccattcttatcttttaccgtgccggcaataagtctttcttttctctgctgtgcaacgtctttttcttttgcagccagtactattttattatccaagactttatattcgatgcccacacctttaaagacttgctccagaacctggaatatattcttattagacactgacaccgacaccttgcgtttcaaatcgagattcttactgtttacaaaaaagccgaatccggactcaagttcgattttgtgaagcacttcctctatggtacaatcgtttgccttcaatgtgatggaagtcttttgcgcatatccatcggacgcatatgccagtccgaatgagcagacaatgagtataaatagtaacttcatagatagtgatattttccttgaagaccgcctaagaaggtttaatcctccaagaaattggacgatacaataattttgcataaatttgtaacgagtttaattaaaaaactagtagttatacttgtcgggaaacaagtagattcacgattactgggctcaatacgggaagatacgaccaatatcatcccgtatcttttttagtttcaagggtctttgtttttcatggcaataagcttttttgaaataaggttattaataacactaaataaaaatttctatcttcatcttctctttacttccttgtacactgttcagataacgccagcgtattttcgaagaagcttctatataattcagtatctgctccaggctcctgctcgtgaatgtcccggagaacaggtcatcatcgggcacattgcgtcgaacgataaattccacatcatatctgtctgccaaaatctccagagcatcctgcaaagatgtctgcttaaagacgataataccatccttccatgccagttctccctcaccggaagtagtatagagctccgtttttccactctgcgaataatagatcagcttctgaccgggtgccatagtaatgtactgaggcttctgtgcggtattattaaattcgaaatgcactttcccttctatcagagtggtagtaatctcttcggaatccctatacgcctttacattgaactttgtgcccaacactttaatcgcagactgatgggctgtggaaacaatgaactgtttctccgggtctttctgaacttcgaaataggcctccccgtccagttccactttacgggtacgggaagcgaactgactgggaaaagtcagcgtactttttccgtttacccataccattgttccgtcagcaagcgtcacttgcgtacgttgtccggcaggcacatatacggtctgcatttctacattttccttttgcagagtttgtatcagtatataacttaatccgaaagccaaaacaaatatagccgcaatccgcatcgccttcatcgtaaaagtgcgtagtgaaagcagcttgtcacgccccgttttcaactcatccgcatcctgccaaacaagtgcatcataacttttgcggagtgacataaattctttgagattagcggcatcggcatcaatccatgctgcaacttcttctttctccctttgagaggcttttccggatatatattttaaaagtaaattctgattcatattataagttgagttactttataagtaataaacaggagtatatttgctccccctttcatatagaataccactcactaaaaataatccctagtgagaaatacaactttttttgctgttattaaaaaaagaggagaaaaagatattttcaagatcatcaaataaaaaatatcaggaaaggagcatactctttcagattatcacgcagcagcttcacagctttgcttatatgatactccactcctttgacactgatacccaattcttcagctatttctttatgagattttccatccagacgatcggatataaatgcaatgcgcgtcttttccggcataccagccaacaatgttttcacctttgagcgtaattcttcggacataacttccttcggatcacaggcttccaaggttgaaatacggatttccaattcccgttgtcccttatctgtcaggttttggtagacgttctcctgaacctgcaaatgtttcaggtaattgagtgacttgctacgtatataagtgattaatacagcttcgatactcggaatttcctgttttttacttaattcccacaaataaatgattgcttccgatacaatatcttcagctaccaaatcattatggacgtatgataaggtaaacaggaatgctctcctataataggtagtatatatcgaattaaaattgattgcagtcatttcgatctatattaatggcgcttatgcgtatagtttaagtatatccaaaggtctttaatgattgcaaagaaatatatttttaattgaataaaagaactttttgaagagaaaatggaacataagccggtaaatcatcagaaggctgacgactggcatataactttcacgcctttctctccccttttttccaatgctaaaaactgaccaatttatgctaaaatcagatcattgcatcatttctatactattatgactcaaaattgctctaatctataaatccaacttcctatatttgcagccataataattaaaacacaaaaagaatatgattacaagtagaaaggtttctcaggtcaatgtttttgctggtagtccctgggaagtagccagcgtgaagagtttattgaaagcagcgtatatcgaggcatcaatgaaagacaatggattgaacagtatactcatttctgttccatgcgaatattatacagcagcaatgcgtgtgattaataaaagaaaagtttcataggttttaggttaaacatataagattaaagccgggtacgatgggagatcgtgaccggctttttcagtctctgtatgattcttttaaaacaaagtaacctttagattggttgactttctgtttgtttaatcttcagtttgctcaatttctactttttcattctttagcttttcaagagcggcaatctgcatattacagaaaaggtgtatgtgatgaatcaagttagtattctgtgacaagtaaacgacagagtccataagttgggcagacagttggtaggctttccgattatttgtattttcgtccggacgacgcatataaagggcaaaacttcggtacaagataggaataaagcgttcccatggaagttctaagctaagcaacaaatggttcatactctccagcatacgttgaagatactcaaggtccggcttatcggattgcatgccatacacctctgcccatagacgggcttcttcttcaaaaaaaatttcattgggactttctttcgcgttagtcaaagcgttttcagtatccataagataaaagtttaataaaagggcaaaaaagaacggtttcgcctttcccgttgactaacacatacaaggatgctggaggtacattacatactccccacgggggtacgaaaccgcctatgaggaaagctacaggcaaataaatgcccgcaacttttcagaagcaggattccctgcacccttgtatattatgttagtcactgcaaagatactatttttcaaatataagtaaggaatatctgtaggtttattgatcagaatttccacctttacactaacccgcatcgtaaacttacagccgtaagtcttaccaccgtaagtttacgggagaatcaataaattagttaagaaggagaaaaacaatgaggttttacaatagcccccccagtaatttgacagcagttttgccctcatgctctaacaaaccgtctgtatccctttattcatcgtggttttcggtgtggtagcaactgtggtggcaggtatgagagcaaacggttgctctcactctgtttcatcctgatcagtattgtttccacattactatcttttgatttacaggatgttaatatctgacatctcaactgttaacgtttgatctctcagtcattaataactgagaaatcagctattaatggctgataccccatacattattagccaataaatgattcaatgcttcctaaaagaactgtcaattgaaacaactaacacggtcgagtcaatccaaacatacggtcaagtgaatccaatcgacaggtgtttcagaaagtttcaaacgcttgaaactaatagtttcatgccttggaacaaaaggtttcatgccttgaaactaatagtttcaaaggttgaaacactttgttccaacggttgaaactgacattggaattacaggaataaaacgaagatactacaaaggttagagattggatttggaaaagtgagagcaagcatttgctctcatacctgctaccacagttgctaccacaccgaaaaccacgatgaataaagggatacagacagtttgttagagcatgagagcaaaagtgatgctaaattactattgagcaatccttgataattctctgcacaacaaaagtgcagaaatatgcataatactgcacttttgttgtgcaattatcgcatcattgcagataaatgcacttcagctatgaattgcttatacgaaaacttcaacaagttatttaaagagtacgagcacgaatatagcacccattcgatctatcccattttggtattttggaatgaattattagtaaactaagcaaaagcctttttcatcttttagtccacactatttttataaaaggcactaattttattgaattacctcactaacagagcgctagatttcaaaaagaaacttaactttgcacccgagttttatataaagagactgaattagtaactaaaaagattaaaccgcatgaaaattaagactttaatagcctgtttcatactagcttgtgctgcaacttcctgcatacaggatgaagcactgaactcagaagcagccattgatgcttgtacaggggatgatgttcaattagcaaacatcaatgctgactcaaagctgattaatgtatatgtaaacaagggagctgacttgtccaaacaaaagttagaatttgtaattccggaaggagccactataaaaataaatgatcaagctgctggagatacagaagccacatatgactttagtgaagagccacattcccggaaattcactgtcacatcagaagacggtcaatggaaacctgtttataccgtcaaggtcgttttagcagaattacctacttctttcaactttgaaaagttattaccttccaatgactacgatatcttttatgaattccagccgggcacttcacaagaaatatctaaagtattacaatggtcaagtggtaatccgggttttaaattgacaggtatggcaaactccaaaacagattacccgactgtacagatagccaatggtttcagaggtaaaggagttaaactggaaactcgtgataccggtagttttggagcatccgtaaaaatgtatattgctgccggcaacttatttatcggaacatttgaagtaggaaatgcgttggcaaatcctagaaaagccactaatttcggtttccagttcgataaacgccctaaaacgctcaaaggacattataaatttaaagcaggagatgtatattccgcagaaggaaagccacaagagggtgtaagagacaaatgtgatatttatgctgttatgtatgaagctgagaataattctgtcatgcttaatggtgatgatgtatttacttcagataagttagtatcattagcgcgaattaaaccggaagatgttgttgaatcagatcaatggactgattttgaaattcctttcgaaccggtaaaaggacgagtaattgatgataccaaattaaaaaatggagaatacaaattaggtattgtgttttcgtccagtgtagacggtgcttattttaaaggggcagtgggcagtacactatatgtcgatgaagtagaacttatttgcgaagactaaaaaaacaagaaaatgaaaagatataaattactcaatattatagctgtactactattagtaagtacactttcagcgcaggcgcaagaagaaagaaatcaaggtatcatctggtcgtacttacacggatgggaatatggaatcaaggcaggtttcagtattggaggaacttctccattgcctctacctgaagaaattcgtaaaatagatagctatgcccctggtggcctcgccatttcaattgaaggaaacgcaactaaatggtttgacacgaaatggggaatgactgtaggggtacgacttgaaaacaagaatatgaccacagaagccacagtaaagaactatgggatgaagattatcaacactaacggcggagagttacaaggcttatggaccggtggcgtaaagactaaagtcaaaaactcttatctgactatcccagtagttgccaactataaagtaagcaaacgttggaaagtctcagcaggtccgtatgtatcttatcttattgaaagaaacttctccggacatgtatatgaaggtcacttgcgtactccggatcagacaggttcgcgagtagattttactggtgaaagcattgctacttatgatttctctgacaatctgcgtaaattccaatggggattgcaactaggcggtgagtggagagcattcaaacatttaaatgtgtatgctgatttaacatggggcttgaacgatatcttcaaaaaggattttgataccatctcattcgctatgtatcctatttatttgaatataggattcggatatgcgttctagagaaaacactacaatttatttaaataaaaacaactaaaaaagccgttaattttaattgcattaatgtatacaattggaattaacggctttttctgttatatatttcttatactcaacacactattgaggtgttaccgtaaaactatcaataaataaggtactaccaggagcgcccataaagtagtctccttcagcacttgaggaacacacaatagctaaataatattttttagttgcatcataacttttcccttccaataatttaaatgggatagagaacttagtccaatcactcttcgctgttccatcttccaaaacggccttcattacaatacgtttagagcttccaatatatagatcaggatcattgtagtctccattcaacggaatgttgttattctcttcatccaaaagttcttcatacaaaactgcatatattgaacattcatctgttttatcagctacgacttcatttttattattataatatgttgtccctggagtatatttataatagccagtaaaagtagcaggttccccaacaaaaggaacaccaaactttgtactattcaaagtattattcatatcagttttaaagatacctgtaaataatgagcctgctgttacataaggtaccaaccctcctaataatgcattaaaatccataccatttaaaaacatgtaagtataaactgtttgcaatttagctgctttaccactttgtccttctacaggagaaactgtatatgagaacagctctggaagatttgaaccaaacatctcgttaattgtcataattcccggattactagtaccataaagtcctttaggaacatcatattgttctgtagaacccgatgtagatgatttgatagtctcccattcatcgaatccaaaatctcttatttgacctgatacagaaactgtatatttagtagttacaattccatcttcggaagtcactgtgtatattacaggagatgaaaaatcttgttctactccagaagcaggagttattgttgctttatcagaaataacaatagtaggcgcaaacgtcaagttctccaatccatctggaataataaaactaatattattcccatctattttcccctctacattcgcatctcctatcttaactacaaagctctggatcgcagcctctgaactttgatctgcagacagttttgttcctgcaaaatcaaccttcacattcaaagttccgccagcaacaacagctatattcattgccagtttatcaccttcaatagttccattcactgttacagcacattcaccaactaataatgtaatattctgactacctgcaaaagtataactattaccatttttttgtacagaaatctgttctactgcaatagtaccaagattcaatgtctgaaaactaaagtttctcagctccatcttaatttggttttcaccagtcttagaaatatatactttttgtgttatatcattaacttcaataactccagctgcatcaacatctaacttaccccaataaactccatcaatttcaccatcccgaatagtttctgggtcgtcatcactacaagccgtaaaaaggctgactgaacaaataagcataaacaaatacaacaaactctttttcataattctgttatttaattaataatctatttgatcgcaaaatcgggtacaaagtaacatatttatattagttatcacaagatctattctttgtattttatgatctgattttaagattacattacccaaaacactgttattatagagtttttaaggttcatatttacactacatctaacaaaagagcattaaataaggggagattaaaatcccccctttttattcaaaaatactatagttttcaaagttatatttctaactaattgattcaatctaacctcctcatcattctccaataacctctaactcatcgataattaaagtactatttacagctcctttaaaagctgcaccatctttacttgaggaacatacaattgccagtttatatgatttagacatatcataagattttccgtccaaattattgaatggcaactcaaaagtagtccactcagcttttgctccaccatcttccaatacagctacagctacacgatactccgaagatgcaatatcatgcccagtaagtattacctctttgccttcactatccacagcttcatacaaaacagccattatagagcactcatccacaatttccagatgctccagaacattctttttatcagaaccatctacatagttatcaccaggagtatatttataaatacctttaaatatcaaaggcttttttgcatatggaataccaaatttagtagaatttaactgatctgatgcatcggtcttaaaactaccagtaaataaagagcccgaagttatcgcaggagccaatccaaaaccagctccttttgtatataaagttatcaacttggcagaggagccactataaccatctttatcttctaccacaggaaaaccacctttaaaacctaaagtagctaaaagccctgctccttcattggaagtgctcaattgatccactggagccggattccaatattcatttttcaaaccttcatgttgaacaacccaagtatcaaatgaatactttaaaaaattctgactacccgctattgaagctacatattttttagtcgttccatcttctgctataactgtataggtaacagttttaccagcggaaaaatcctgtgggacaccacttttgggagccactgtagctttttctgatatttcaataatcggagtcaatgatttcaaatcatcatcagtagcttcgtcattcactttaaacaagattgtacccttttcttcatcaataaccggcgctactgtcacaacctcattatcaatagtaaaactagtaattttagcctctgatttttcacttcccgatagtttagcacctttataattgactttaactttcattccgccttctacatctacatcaataaccatatctacagcatccttaccaattgtccccgaaacggatgtattgcacacacccaccacaagacttaacttctgattgcctgagaacttatatgtatcaccactttttgtcagagcacaattatccactgttatatcaccaataagaagttcagtacccgccacggtaatagtaaagtttctcaattctaatttaacggcagtatctgaagcctttgaaatataaaccttctgaaccatatcagaagcaataggagtagatactcccacataatatacatccatcgttcccttatatgcacctgcaagttcactatcaacaggatatttcacatcatcatcatcactacaactcacaaataaacttatggaacaaataagcatgaacaaatacaacaatcttttcttcataatcttcatagttaaatattaaatatttcttatcacataaaattatgcaaagttaattattaaaaagcactaccgcaagtgctatttttggtattatatgttccatttttaatatattctcaatatttactctaaaaacaagtatttataggtcgtgattctatatcctataaatcccacatccatcaacgacagtcaaataaaactttccccaatttaatatccgctcaacagcctcccccttacgaatgacagaagtgaatttacaacattataattattgcatatttattaaaaaagccgtatctttgcagtcttagtcataattgaaagtttgtcaaagtacaaagttagacatgtttaatattgaatttattacaaatgtcgtttcgttgtgatggcggaaccatttgaaattactactgatttaatatcattttactcagaatattcactcgtgacgatgcgatattctttcttaatctataaatatatatatttgcaaatgttgacagcccataatgggcagttagcgccgtttgtatgcgtgatgtcttacgtgtttaaatttagtattgcttatatacatgtttataatgatgaaaaaagccctggaccgtgatggttcggggcttttcttgtacttgcaataagcaagaaggaaaaagatttcagattacatcggcaactgtgctattatctctttcgaacataccggcaatttgccattctttcccatatccacaaaaaccgttgcacacaacaccgtccattggtcaccatatgtcatcgtactgctatggctatacccaaggcaatgcccgtattcatgaaacatggcctgacggggataattatgcggatgggcatccggaggagtcgcatcaaaataaacaccggtataacaataattagccaagccgtacgtattgcctccacctaatccgccgacaccggcaacacaacccagcacaagcccgccatgattacggattcttagacgcaacgcatccagattgatcggatttcctccattgtctttcaacaaaccttcgtatttgttcatttccatattaaactcttcggaagagaacatgaaagccatattgacagccaacgccactccgtgacggcacaataacggattcatatgacgccaatacgcatgaccattgtcagccgaataagaagaaaaacgtataaaccagcgactgtctatctgttctattttcttcataaacggatcttctgtacgaataacaagcgtcacatcgtcattggaaagtccgggttgtgcaggcaccactatcttccgtccactacttgtagtgaatgtccgttccgaatctacaaccggcaaggggaatgacgcttccataaacggataaatctgttcaaaatgtgccagttcgaagaactccatgctaaatttattaaaacggcacataatcttcacatcctgaatacctacaggagaaaagaacttgacaagcaactgatgttcgtctgaaatggaaacctgcaacggagcattcgcataaaaagaacgacggcgactgtcataaaagacctcacgtggctcactggccaaaaacatcgtatccgcgcgaaaccgaaagaagtcctctttgcgaacataaagtgaaccatcctgattttccggatgcagataatcaatactaatatgagatacacggcctgcctcaatcttacaatccgtgaaacggtatttacggacaaactgagttccgtcactgcgatcggactcaatcgtcacaaatccggataatgcttttgtgccgggcaatgagtaaaacgagtatttcccggtaatgtcataagattctatctttctggttccggaatatttcccgtctgcaccaagagtcccatatattccttcggcatcgtcgaaagttatatcgattttacgaatgaatctccacatataatcggacgatacattcaaatcgacatccactcgccctacagaacgctccaagaccactgtatgcgacaccgaagcctgatctctgccgatatgcaattctattttcttataaaagtaaaccgcatctaacggcgcattttccgcatgatttatcaaccagtcatcggacagtttttcgggttctttaacagcctcatcttcttcctcgctcgtagtagccagaaaaacgactgtataatcccccatactcaatccttcgatagtcaattttgagaagttttcttccagcttctgatataagggcttaataatctctccacgttcattggcaatagcataccacatacgagtgatctgctccggtttgcttccgcgtgtctgcaccacggacgcatcgtcttgctgcaacccaaacaaaaacgacacttgtccggaatgggaagaaacaatgccggtttcctgttcaaaatcgcccgaacagttggtaagcaataatgcgcccagtaatatcattatgattcttagcatcttcataaacagcctcctctatttctttacacaacgtacggatgcaaatgcttccatctgtaaccgctgtttcttaataacggttgactcggctccttcgaacggcaaccagtaagcccatgcataaccgcccggaagaccgttacgttcgtttgtccacaacacagctcttttcccgaaagccggattattggatgacgacttatctcccttcgagccagccaaaggaataataaggctgcgaccggtgtcttccgaagtaaacttcacataatgctgtgttcccgtcacaccactggacggagttatcagtgttccttctccaatgtgaagtgtagcggcaattgtttctccatttcctgccttatatctacccggaatctcttggtctgcaggaagcagagactgccattcgttaccagccggtatccggtatccttcagggcaaggcatatgtgtatcattcacccaaggtgtatcagctgtctggttacctaaattgttggaaggattatacccctgccaaggcacgtacatatataaacgtccaaattggaacagaccacccaccgtgttaatccaacttttatgatacatatcttcgaccgtagccccgtccaacggataaatctgatcttccagatcgtggctacgcgcattaaatgccatccatacatttcctgcgatttccacagtttcaatctgtttgtcactcggagccacacgtatctccacgtaatcatatgttccactcaacaaggcatttttcaaatgcaccaaaaccgtatagcccaggcgaccgctgccttgcgctgcaaccgatacattaaatgacgacacgataccttccgcctcttccgacacggacatattgcctacacttgttccgctaccggcaccttctgtagaagaaatatcgatacgagtgtctgtaacgaacgccagcgtcatgttatcagcacctgtagcaggcacttccagtatattattctcatagtctaccttcaccccttccggaatcctggatttcgacgcattaagcaaaagacgttggttcgtatcaggctttccgacaatcgtttccccttcttcccacggtttgatctcaaaaacacctgtcacttcagctcccacattgagcactgccaattcatatactttattgcgttcgacaactggcaattcgacttttaacctgatagggacttcaccataggttccacgcaagatgatattgacaggacgtgtgctctcgaacagacggaataccccctcttgcttgccatcgaatgcagaagagaactccttccgatagctcaccgttttatccgacgcccggacattttcgaggaatggtaaagtctcggcaggagcattctctacgatgacttcctttatctgcgttttgctgtcggctgttgtgttcaaatcaatgcgcgccacaccgcgtttcataattacattgacctccgcattgctgcgtgtcactactccgctctccaattcgactacagccgccatgaaatccggcgcagaattatcatgcaatccttcaccgataatcgtattacgaaattcttcttcacttttagctttctctccggcaggaatctccagtccggtcagaaaataaagtcgagatccgctgaccgcagaaatctccgactgtccgccttgcccgggagtcagctgttcctctttatataaattcccgtcactaaactggaaaaccgatacatctttgagctcttcagaagattcttctcctgctaccgtaattccttttaataccactgaataagtttgttgatggccttttcccccggttggttcatcgttcgagcaggcgcctgaaagtaatgttcctattataataggaacgatggtttttctgcaagaataattcatgtttttttgattaaaataatactgaatattggaaactttataaatgcattttccaaaagcggcggcaaaaatactacttttttcaatacagcaagtcatctgcataaaattttaataaatatgttgaataaaagaaatctttaacgtcagactaactaaatacaaaataaaaagttatttttgcaaacgttttttaattttatctcattctaatattatgtacaagatttttcacggcttccacctagtagaagcttatcaggacttaaagaaagctaaacggttagcaaagaatcagacagtggcccgatgtataaagttaaccatagctattaccctctctcttattttatggttccttcccattgatacttttggaatagaagggttgaccgttatagaacaaagacttatttccattttcattttcgccacactcatgtgggtgttcgaagctgtcccggcatggaccacttccgttcttattgttgtactattattacttaccgtttccgacagtagtttatggttcttaacccaaaatactcctgcggaggaattgggacagacagtcaaatataagtctatcctgcattgctttgccgatcctatcatcatgctgtttataggtggatttattcttgccatcgcagcaaccaaaagtggactggatgtattgttggcacgagttatgctgagacctttcggaacacaatcacgatatgtgctattgggattcatcctcgttacagctgtcttttccatgtttcttagtaatacggctacggcggccatgatgcttaccttccttactcccgtattaaaagcactcccggcagatggaaaagggaaaatcggattggctatggccattcccgttgctgccaatgtaggtggtatgggaactcctatcggtacaccacctaacgccattgctttaaagtatttgaatgatccggaaggattaaatctgaatatcggttttggagaatggatgagctttatgttgccttacactattattgtactgtttatagcctggtttatcctcttacgactgtttccattcaaacaaaagagcatcgaactgcaaattgaaggtgaagcaaagaaagactggcgctccattgtggtttatatcacctttgctataacggttctattgtggatgttcgacaaatttacaggagtaaactccaatgtagtggcaatgattccggtagctgttttttgtataacaggcgttattaccaaacgtgacctggaagagatcagctggagtgtactctggatggtagccggcggcttcgcattgggcgtagccttgcaagagaccggactggcaaagcatatgatcgaagccatcccattcagcacatggccccctgtactgatgattgtcggttccggactgatttgctatgctatggccaactttatttcacacacagccaccgcagcattactcgtccctattctcgccattgccggaatcagcatgcgtgaaaacctgtcatcgttgggaggtgtagagactttattaattggagtcgccatcggatcatcgctggcaatgatattaccaattagtacaccacctaatgccctggcacatgccacaggaatgattcagcaaaaagatatggaaaaggtaggtatcattatgggaattataggacttatcttgggatatacaatgctgatcatactcggctccaacaagttattataaataatctattaaaaaaagaagatgtcaaaagcaggatgatacatttatcttgcttttgacatcttcttctttttcgaatttagcgtcctataatcctctccaaaagtttataagaaacaacaatggtataaaacgatatctcgtctactctattcctgatccgaattcacaaacttacttggactgacattataatacttcttaaatacctccctgaaatacttcgcatccgaaaacccgacaatttcagcaatctccgttattgtatattctttctgctttaataattgtgctgcacgttgcaaacggatcatccggatgtagtcagccggagcataaccggtcagcgctttcagtttattatagaaacttgttcgactcatatgatgctgattactgagtacatctaccccaaagtccaaatctcccatattcttctctatacattccttgactgaagctatgaatttccagtccaaagtattagtacaattgacaggtaaatgcttttctttattttcgatactattatagacctgacggagcaattcacgatttgccaatatgtttttaatagtcacctttagtatacccacactgaatggcttggttatataggcatctgctccgatttccagtcctccgagtatatttttctcatcccctaacgcagtcagcaatatgactggaatgtgagacatttccacactcgttttgatagctgagcacagttcgtctccactcatctcaggcatcattatatcggatataacaagatctggattaaactcctttataatgacaagcgcatctttgccattggaacaggactggatattataccctgccataagcatatccacaagataattacgcaaatcatcattatcttccactaccagaatacgctgtaaagaggtttttatctgaggtgcctccaagaccggcaagtcagaagttccccccagtacaacagcatccatacgttcattcggcgtttttggagagataaactttgctttatgcaaatgggtatttcccttcgggaaagtaatttgcacgcatgttccctgatgttcaacactttgaatatggatctttcctttatgcaacttaaccagtttatataccagcatcaatccaatcccacttccggtcactttcaaattgactacattactaccccggaaacaatttctgaataatttcttctgttcagatgaaggaataccaattcctgtatcctttacctcaatactccaagtattcccttcctcgcaagcacaaatacacacgctaccattctctggcgtgtacttcaacgcatttgacaaaatattcttcaaaatagatcccattttgtcactatcaaaccacacattcaaataatcaaaattactttcataaacaaatctgacacgcttcatctcagcatatttgcggaaagtagcacaaacatcattcatataagaattcaattcatactcagaaacataaagagtagacgaatatacgtcgatccgttcaaagtttatcaagttggttgtcagctgaagcaatgtattcacattctttagggccatattcatatggggtaatgccttctctgccaccatatggttttcaacaacttcttccagcggtgcttttatcaatgtcagcggcgtacgtatatcatgagcagtattaataaaaaaacgtgtcttctcatcagaaatcttcttttgtttatgcaacatgataacacggaatatgataatcataatcaagaccaacaaaattgcataccccaccattgcccacatactggcccacaccggaggggtaataatgatctgaatactccttgtttcataagttttatacttctcctcattagatacagtacgaatttgtaacgtataactgccaggaggcagatttctaacaacaatccgattatcttgactcggacgggtccactctttatgataaccgtcgattttccatgaataaagaatattagaaggataatcataatttatggaagccacatcaagcgaaaaagtattttgaccgtaggccaattccagacaatcagtctcgttaatatccttcttcaagggagatccgtcatcaccaggatagacaggatgataggctatcataaaatcccgtaataacaaacgcgaataatatggctcaggtatttctatgtctgtcggaaacttaacagcaccatcattgccaccaaagacaagcgtactgttactgtaagttgtggcagaaccggcattaaaatttacgctcatcagtccctgctcccgtgtccagttacggaaaaaatgatctttaggtgaataaatcgtaataccattttccgtacccatcaggagattttcatcctgacgcggaataatcgtataaatattatcagaaatcagtgcacaattatcagttcggtactgatgaataaacttctttttattgatatcataaacaagaagacctgctccacgagtaccaatatacaggataccatcttctctctggtataatgcacatatataaggagattcaacaggcaagtcaatataccggtaaacaccggattgcttgtcaagttgatagagccccattcttgtaccaatccacatttgacgggcatttttctccagaatggtggtgatggaacttactcccggatacaaacgaacatttttagtctcaagattaatgcgtttcaaatgataatatccaccggaccatacatcaccgcccgaatcctttttaatgtcataaatgtattggtcaggacgtattcctgcaatggccgcaggcgaaagatagcttattttaaatcctttcttcttttctatcttataaattccagacgtaaaaccaccagcccatatcacaccaggagagacttcacacaacgccaagaagatatgattctcatcatccggcaccggatcaaaagaactaaaaaaaagaacgccattctcttgtatcggtctgataaaaactaattccattactagttgcaaaccaaaggtcaccgtcactatcttctatcacatcatgcacctgatcattcactaacgaccggttattgccaagagaatgctttatcaaatcatatcttccataacgattgttacgaatggtaataccagtaggataattggcaagccaaatacgctcctcctcatccacatagatatcattgatattgtttccgttcattccattataactgctatagtcagccgttatataaggttcactcttacaagtatttacattcagcttatatactccttttccacccgtagctatcaacaactcatcagcgttcagagcaacaatctgattaacttccacattgtttggtgcataacaaggagtgattttttgggttttaccaatatcatatataagtatcccttctttataactacccacaaataattgctttgacacagtatggtaatacagttcgtgaacaggtgtaacgatgctttttactacttcatcaggaatttgtttcagttctcccttttctatcccgacacaaaacaaaccgcttcccgtaccgataaaaaaatgaccgccatcagcctgctcaatagtagatattgcaccatcgacaggctttggcatatgttgtgttgttccagtacgaatattataccaggtaattgtatctttgtaacatagccaaatatgatcattcttgtccagataaccataatcaagaaatgcttgaaacttatttcggatcaattcagggtgtacataagccaattcaaatttatcatgttgtgaatcatacctgaaaatacgtcctttctgcccgattacccataatacatcttcctgatccatataaagccagttcaaagctatccgtgagtccagcttcatactgtcatccgagaaagtataatgcttgatgtgtttaccgtcataacgatctaccccctcctgagtcaaaaaccacatatatccgcgtcggtctttttgaatatggtagattttctggttgttcaaaccgtcttccaaccctatgtacttataaatctgccccttgctcacagcactactaatgagaagaactataaacactaaaagttttctattttttacaattatcttcattcctttcacaaaacactcaaaaatacatttgcaaaaatatgaaaatattatttaaacagcaactgaataaattaataattatatgttaaaaacagaaacttaaaaaacacaactatctcatctatcggaaatactgcataataccccaaatactccccaacaaaaacatcggaaatagataagtgttctttctaaattatattagtcattttttgtacgattttccagcatcagatcataaatatacacgaacaggaatcatcttattattaggacaatttcaatcatatatttattccttcgattatgcatttaaaatccataagcctctcttcaattttccataaaataaaaaatgatgttaattccattttcaaacttcgaactattttttttaatcccgtgtttttttcatacagtaggagcttaagtacatttcggatgatataacaaaagtaatataataaatcggggaagtgtaatagagtaaacctacatatttttctaaaaaaaataagttttaaacattgtttcatcaataaaatctacagccatgaaaagtataagttcaaatttatggatcagattaatagtcagttctatcataggaacaataatttattgtttatcaagtatgagacagcaaacaagctgactataaagatgaatattctagcgatatgaataaatatttttccattcaacaagcaaaatatttttcctttataaaatactaattatatatctatatatttacatataaacccactaataagtatgtgactttaagaacttaacttacatacagtttcttacttattaccaaactctatttttaactatctaaaaccaacttaattatggaaaatagaacttctgatttatggctcggtcttggtataggatcggtcattggcgccctcgtttatcgtttttcacgaacttctaaagccaaaaaactaaagaaaaaagtatgtgatgcctttcataaaataagtgggcaagccgaagaaatgttagatactgcaaaggaaaaagtattggatacgggtgctgccgtagccgataaagttgcagacaaaactttcgacctagctgaaaaggcagatgaccttaaaggcaaaatgcatacaatagctgctgatgcaaaaaaatgaaacagattctagtaaaccaattaagaacactagagtgtttctgaataaacctaaattattaactaaaacttttgaattatgaacaagaaaactgaaaagaaacaggaagaggcaaagggcactaaaaagaccgcccaagctaaagagtgcaagtcttcgacttcaagcaaaaaaactgaaaagaaataggcattcagaatcgttaagtttgtgtcattcttcaggcagacaggaatctgcctgaagaatccaccaatttattctcaaagtgactttacaattttaaattaaaagaatatgaaaaaattattatttgcgatttttgtagttacaactataatatccttcacgtcctgtcgtaataaaaaagaacaggataaagcgaaacaacaagttgaaaaagtgaaagaaaacgtcaatgatgcagtggacaaagtatccgataaaatcgaagatggtgctgatgccgtaaaagatgcgtggaaagacaccaaaaaagacgttcaaaacagcgcagagaaaaccaagaaagaaatcaaggaaggatataacgaagtgaaaaaagatgtaagtaaaaaacttgactgattcttaatcgtatatcattctataaatagtaacttcttacatattaataagctatggttggatttgtaatatggattgttggattagtactgactatcaaagccgcactggaaatatggcgtatccatgcaccaatagaaagacggctgatagctattatcttaatcgttcttaccagctggataggattgctgttctattatttctacggcaaggcacgaatgccgcaatggctgggtactggagttcaaaaatattagctacatcagaaagcaatatttatatgaatataattctaaacatgggagagtacagcaaaagtcaatagcaactctcccaaaatttccctccttcaagaagtagatttgagtcactattgacttttactctctgcaaattaccaatatttttcaattctctcataaccgaaaatcctaccgcgttcatcatctataccttgcaacttcttgcagataatctgtgctccaatcatactaaaggttatgccgttgccaccatatcccaaatcaaaaaacatcctgtccttatctggacaattaccgataaagggtaacccatcttttgttgtactaaaagtgccacaccacgccatttctgttttaaaaggaatacttggaaataatctcctaaatttcttttctaatacaagagttttctttctgagtaacgcatcacggcgctccggatcactgaacttttcatcttcaccaccgacaatgatacgatttccccttgtagtccgtatatacaaatatggctcagctgtttcccaaattaaacactgttcaggccacaaatctttagaatctaccggatgcgacacaagtgcataagttgaagtcaaatccataatttcccgagataaaaacttccctgcttcaaatccggctgcgatgatcacatatttacactctattttatgccctctatctgtttctataatatatccttcaggcatttcaacacattctgttacaccggtatgagtaaaaatttccagtccatcttttttcatatggtagagcaaaagaccagtagccgctttgtaagcatccatctgcgccgatactcggtttaacagtgcattgcctggaacctctatattatacagtttttttatctcctctttttccagcagacgaaccggcaaattgtgcttctttcgtatcacatattctttttcaattaattctatatcctttggaatactagcataaaaaagacttggtcgtttttcaaaatcagcatctactcctgtttcctttaataccttttcaatatcagcaattgatgccaaagatgcgcgatatgcagaaacagcattatcctctccaataatttctgccatttcacaaagaggaacatcaatttcatattgcagtaaagcggtacttgcaatggaacttccagttgcaatgcttcgtttgtcaaccatgcaacatcttaaaccggcactacaaagctcgtgtaccatcaaagcacccgttataccagaccccacaactacaatatctgttgaaaaatcatcctccaagggatgaaagtaatctaacaatgaatttttaacaacccaatagggcaatcctgaatgtaagtccataatatattgaattatgcaaactccctttcatcctcctccacacttacagcggggagaaaaacgtaaaaacatggaaaacacaaaagcattcccaaaagagtttactcccgatttataataagatactattcaccctgttcaattgcgcaatatcttttacattgtatcaaaacgttctcaaaataaacaacatcacacaaaaaaagatagttcgaaggaaaagactggatttaacatctatttaatgcacaagaaatattgtaaaacaaccagcatatatgaaggtattcaccaaacaaaatatcaacatactatctaaataatatatcaaggtatgaaattaaatctcagtagccccatcacatacttttttaacattaaaaataaattcaatgacaataattatcaaatatattcggtgaggttgtaattgcccctttatcagcagggcatatggcggtagaaacacacaaaaagctccgtaaatcaatgatttacagagcctttaatcaggaatactcgtactcgaagcgggacttgaacccgcacagccgcaatggccaaaggattttaagtccttcgtgtctaccattccaccattcgagcatcctttcaaagagagcggaaaacgagactcgaactcgcgaccctaaccttggcaaggttatgctctaccaactgagctatttccgcattttttcaacgggtgcaaagataatgagtttccttgtttctgccaaactttcgatcaaaaaagtttggcagaaaatattttatcgccctaataatgctttctcagcctgctccattccacagaaattgaagccatcgaccacttgttgcattaatgcggagatttcatcattacaaagattaccgatacttccttcgtgtgtatgatgcacctgtttgtcatgagtaaattttccggcttctatatcaagaccgactttcttatacgcatcacggaaaggcataccttcacgagccagtcgattcacttcctcgacactgaaaataaacagatatttatcatcatcaaggatatgttcattcaccttaatctcattcatgatataagtcgtcatctgcaagcagtccttcagttcctgaaaagcgggaaggaaaacctctttaataatctgtaagtcacggaagtaaccggatggcagattgtttgctatcatcattatctgctgaggaagagactgcagtttattacatttagcacgtgtcagttcgaacacatccggattcttcttatgaggcatgatgctcgaaccggtagtacaatcatccggcagcttcacgaaaccgaagttctgactattgaacatacaagcatcaaaagccagcttggagatcgttccggcaatggtagccaatgcaaaagcaacattacgctccaacttgccacgtcccatctgtgcataaacgacattataattcagcgaatcaaaacctaacaaatcggttgtcatcgtccggttcaacgggaaagaggagccatatcctgctgcagagcccaaaggattgcgattgcacatcctgaaagccgcttgtaggaactgcatatcatccaccaggctttcggcataagcaccgaaccacaatccaaaggatgaaggcatcgcaatctgcaaatgggtatatcccggcatcaggacatttttatatcgctcactctgaagaatcaacacatgaaagagttgttccaccgcttccgcgatctcgcgaatctgtgtacgggtaaagagtttgaggtccagcaaaacctgatcattccgtgaacgaccactgtgaatcttcttaccgacatctcccaaacggcgggtcagcatcaattctacctgcgaatgcacatcctctactccttcttctattataaactcacctctttcggccgaagcataaatagtcttcaactcagccaacaactgttccagttcttccttggtcaacagaccgatactttcgagcatcgtaatatgagccatagaaccgagtacatcatgtttagccagataaagatccatctcacgatcacgtcccaccgtaaaacgttcgatgtctttatttacctgcacggatttttcccaaagtttctgcgccataatatttaagtattaggtaataagtagtaagtaataggtaataatcgtagttatgttgatactccgcgggtattacctattatttattacttattacctgtttaatagttaatcatcgacagcatctcaaccatcttctccagaccatcctgaagaggtttctgtaccatcgctttcataaacggattgatatccatactgatagtcactttcaacttgcactcttcctctgctgttgagactagctgaatccacatattaaaaggtagcggagagttggtagttgccagtttaatacatttgcaaggttcacgctcaacaatctgcaacgtcagctgaccgataggcgaaacgctaaagctcagtgtatccgaatcaaaactcaagtcctgtattttatcttccggtaaacggtctttcactgattccaggttgctcaagtccgacagcttggcatacacacgttcctgactgtaaggtattacctttacactactttcaaaattagccataattctttattcgtataaaatcaaagaaagaactatccgaacagatattgtccgaatggttctttcttactaaaatttccgatcaaataatacaatattatttccctgcatcccaatgagccgggtctttacgccaatcgttcaatgtcgcaatatcttcttcttcgatataaccggtacgaagtgctacatcaagtactgcttcgtaattggtcaacgtcaccaaaggtactttagcattcttgaatgcttcctcggcaacgggaaagccatacgtataggcagctaccataccgatcacttcacaaccatcgcgacgaattgcttccacagccttcaaactactaccacctgtagaaatcaaatcttcaaccactacgactttcatacccggacgaagttctccttcaatcaggttttccaatccgtggtctttcggggtagaacgaacatacacgaacggcagattcaacgcgtcagccactaatgctccctgagggatagcacctgtagccacacctgcaatcgcatccacctgtccgaatcgttccaatatcagacgtgtaatctcaatcttcacaaaattacgaagagaaggataggacagagttttacggttgtcacagtaaaagggggatttccatccagaagcccatgtaaaagggttagcgggttgaagtttaatagccttaatcttcaaaagtttctccgcaaatagtctctctaagtttttcataactaaactaactattaattatttgccgcaaaagtacagaaattgaacgagaatagaaagaagaatccgtttattttttaactgaattgttcctcttcctccggaatttcgatacaacgacgtatatctttgagttcaaaaccacggctcaccgcaaatcgcatcagctttccgttcagttcataatcatctttcgcatgaatgcttttccgtttggaagccagcaagtcacgcaggatggagagatattcctcttcatcaatttcgttcagatgacgccatgccacatcggaaggaatcttcttcatgtagagcccctgtgctattttcattttaccccatttggcaaaacgaaacttatcgttcacaaaagcacggcaatagcgctcgtcatcaatatacttttcggtttccagccgttcaaggatacgcgctatggtctcataggctataccccaacgctgtaatttctcatttacttctgcccggcaatgttctgcagcggagcaataagaggcaacacgattcaacgcctcttcatctgttaattgtgcactcatcggttagctgtaagtattctatcttttccaaatatgtcttttataacacgaacgtcccgatattggttcatttctatcatgcgtatcatgtcttgtccgtatgcctgattgatttcaaaatagagtttgccacccggacgaagtagttctcgtcccagttccgcaatccggcgatagaaacgcagagggtcttcatcaggaacaaacagggcaagttccggctcccagtcaagcacattggcttccatctctgttttttcagtttccgtcacatagggcggattgctgacaattatatcgtaagatgccccctgtattccgtcagcagaaaaaacatcctgtcgacggaaggtgacctgagcatccaactcttcattatttttacgggcaatagccaacgcttcttccgaaatatcccaggcatccactttcgcatccggcagatttttatccagagagatggcgatacatccgcttcctgtacctatatctaataggcgacgagcatccggattctcctttacaatcaggtccaccagttcggcagtctccggacgagggatcagcacgccgggagctacccgaaagttccttccacagaactcagcatatccccgaatgtactgtattggctcatttttctgcaaacggaatataatgttttctaattcacgctgtttgcatgcagataaaattatatctttgcccatgtaaatatcaagcgcatccacccccaacatgtcgcaacagatcaacatcgaaagagctttgacctcttccggcggataaatatcctgtagtgactgacgaatgtaagcagtgatgcggttcatattttacgatttcggagtgcaaaagtaagaataatatagcgaagagcaccaaaatggaagaagaaaaatacatgagacgttgcattgaactggcaaaaaacggactgtgcaatgtcgctccaaacccgatggtaggggctgttatcgtatgtgacggacttattatcggcgaaggatatcacatccgctgcggagaggcgcatgccgaagtaaacgcgattcgttccgtcaaagacaagtctttattgagccgttccaccatttatgtcagcctggaaccttgctcacactacggaaagacgcctccttgtgccgacttgattatcgagaagcagattccccgtattgtaattggctgtcaagacccgttctcacaggtcgccggacgaggaattcagaagttgcggaatgccggaagagaagtgacagtaggcgtactggagaaggaatgcagacatctgatccggcgcttcatcactttcaatacgctgcaccgcccctttatcacactaaaatgggcagaatcggctgatcatttcattgacgtagaacgaacagacggcaatcccgtagtactgtcctcccctcttacttccatgcttgtacataaaaaaagagcggaggccgatgcaattatggtaggcaggcggacagcattgttggacaatccgtcgctgacggtccgcaactggtacggccggaatccggtacgtatcgttttggaccgtaccttgtctcttcctcacagcctgcgtctgtttgacggggaagtatccaccatcgtatttacagcagaaaaacatccggacaagaagaacgtcacatatcgcacgattgacttcacacaggacattctgccacagatcatggaagtgctatatcaacaaaaaatacagtccctactggtagagggagggagtcagttgctccaatcattcatcgatgccgaactatgggacgaagtatatattgagaaatgtccgtgcaagctgaattccggtgttaaagcacctgaaataagcgataattttagttattcgacagaagaacacttcgacagacagatttggcattatgttttcgagaaatagctaaaatagttctattcaaggggttctacgtcgataaaaacagcgttattatctataattttatataaaacttccccttaatgttctatatcggaaaaaatgttcctatttttgcaacttgtaaataaacacaatctttcaaatgagaataaagtttttatcaatcattgcgagttttttcatggtgtcattcgttattacgtcttgccttgacaatgataacgaagtcaattatagtccggatgcgactatacgcgcatttgagcttgacactataggctacggggtaaagtataaattcacaattgaccaaattagtcgtttaatatataatgtggattcgctgcctgtcaatgctgacacgatcattaatagtattctgatcaagacgctgactacggcatccggtatcgtgacgatgaaagatcagaacgatcaggattcaatcgttaatattaatgactctattgacctgactaagtatgtaaatgcaaccgagaaaaacaactttctggtactgaaggtatgggcaccgaatatggaggttcagaatgagtacaaagttaatatacggatgcatacgatggttcccgattcactcagttggggaaaagaccctatagcgaacaatcccgtgagcaacactgctgaaaaacaaaaggtagtaacgcttggggacaagatattattattcgctcaaaacaatgaaatttacagtacagcaataccggcaggctctcctactgatcgtttaaactatggtcaaaaatgggataaagaaactactggaaaacttcctgttggtgctgatattacatccattatccgattcgttgacaagttatatttacttgctgagaataaggaagtatataattccaatgacggtttgacttggacaaaagatgaagtactcaattccgatggtgtttccgttactaatctgataaccagcttttctgacagtgatggcagtaaccataaaaagataaatggaatagcaggtatagtagagattaatggagagaaatatttcagttttgcagagaaagatgcaacatgggagaaagatatagacaaattaacagctgtccctgctgagttcccgacaaacaacctgtcagccgatgtatatgcaactgaaagcggaacattgaatgcaatcgttgtgggtaatactcaaggattagattcaaagaaagacacagctacagtcgtttgggcctcagaagatggtaaatcctggattccaatggagattccatcaaataataactgtccgaaattagtagacccgtccattatacattataatgacgcattctacatttgcggaaaagagacaaaagatgatgctaagggattccagaaattctatacctccccgacattacttgtatggaaaggggtagacagaatgttcatgcttcccggaattcttcctccggtgaaacttgaaggaggaataacacaacatccttctcttcacgaatccagcttcaagggaaaagaagcaaactacacaatggtagttgacagaaaccattatatatggatggtaggcggtcaaggcattgacaaaatctggcgtggtagagttaatagactcggatttctaatacaataataagaagtagttaaatacgaaccttataatcaaaacatgtcctatatagagaaaatagacaaaaatcggattccccagcacatagccatcattatggatgggaatgggagatgggctaaacagcggggaaaagaacgaacttacggtcaccaggcaggcgcagaaacggtacataaaattatcgaggatgctgcacgtctgggggtcaaatatctgactttatataccttctccactgagaactggaatcgtccgcaggaagaagtaacagctttgatgaatctattgctggattctatcgaagaagaaactctgatgaagaacaatatccgtttccgcattattggcgatataaagaaattacctgctgaagtacaggaaggtctgtcaagatgtatagaacacacagctaataatacaggaacctgcctggtactggcactcagctactcttcccgctgggaaatgactgaagcagtccgacagattgcaacgcttgcgaaaacgggagaaatatctcctgaacaaataacagatgaatacataactgctcatctgaccacaaactttatgcccgacccggatttactgatccgcacgggaggagaaatccgactaagtaactacctgctatggcaatgtgcttattcggagctttatttttgtgatacattctggccggacttcgataaagaagaattctgcaaagccatttatgagtatcagcaaagagagcgccggttcggcaaaacgagtgaacaaatcagctaacataattcgaaacatcaaattataacataaatgcattatcgtatttcctttatattcgtaacgtttatctgcctgttctgctttgcagccacgggctttacgcagaataccaacactgacgaagactctaagccagtcatcttatactcaggaacgcctaaaaagtatgagatagcagacatcaaggttgaaggcgtgaagaattatgaagactatgtgttaatcggattatccggactgtccgttggacagacgattaccgtgccgggtgatgagattaccggagcaatcaagcgctactggaaacatggtttgttctctaacgtacagattactgccgaaaagatagaaggcaacaagatttggttaaaaatcagtctgacacagcgtccccgtattgcggatgtgcgctatcatggcgtgaaaaagtcggaacgtacagaccttgaaaacaagctgggtatggtaaaaggtatgcagatcactccgaataccgttgaccgcgcaaagacattgatcaaacgttattttgacgataaaggctttaagaatgcagaagtgattatcgcgcaaaaggacgatccatctaacgaaaatcaggtgattgttgacattgatatcgacaagaaggaaaagattaaagtgcacgctatccatatcaccggaaactcggctatcaaaacatccaagctgaagaaagtgatgaagaagaccaatgaaaaaggcaaacttctgaatctgttccgcaccaagaaatttgttccggaaaactttgaagcagataagcagctgatcatagataagtataacgagctgggatatcgtgacgcaatgatcgtaaaagacagtgtagcacagtacgatgcaaagacggtagatgtatatatggatatagacgaaggtcagaaatattaccttcgtaatgtaacatgggtaggtaacacactgtatccttcagaacagctgaacttcctgctccgcatgaagaagggtgatgtttataaccagaagttgctgggagaacgtacctctacagatgacgacgcaatcggtaacttatattacaataacggttatttgttctacaatcttgatccggtagaagtaaatatcgtcggtgactccatcgacctcgaaatgagaatctatgaaggccgtcaggctacgattaataagatcaacatcagcggtaacgaccgtctgtatgaaaacgtagttcgtcgtgagcttcgtattcgtccgggacagttgttcagcaaggatgacctgatgcgttcattacgtgaaatccagcagatgggacactttgacccagaaaaactgcagccggatattcagccggaccctgtaaacggaacagttgatataggtctgcctttgacatctaaagccaatgaccaggtagaattctctgccggttggggacaaacaggtatcatcggtaagctgagtctgaaatttaccaacttctctgttgccaacttgctgcgtccgggtgaaaactaccgtggtatcctgccgcaaggtgacggacagacattgaccatcagcggtcagacgaatgctaaatactatcagtcatatagtatctcattcttcgatccttggtttggaggtaaacgcccgaactcactttccgtatcggctttcttctcagttcagactgacatcagcagccgttactacaactcgagctatttcaacaactattacaatagtatgtatagcggttatggtggctatggtatgtacaactatggcaattacaacaactatgagaactactatgaccccgacaagtctatcaagatgtggggactttctctaggttggggtaagcgtctgaaatggccggatgactactttactttgtctgcagagctagcttaccaacgctacaacctgaaagactggcagtatttcccggtaaccaacggtaaatgtaatgacctcagcctttcactgactttggcacgtaactctattgacaacccgatcttcccacgtacaggttcggacttctcgctgtcagttcagcttactcctccgtactcattgtttgatggtaaagactataaaggttatttctacgatccaacagatgataggggtattacccaagataatatgaataaacttcatagatgggttgaataccacaaatggaaatttaaagccaaaacatatactccgttgatggattatatcgcacatcctaagtgtctggtattgatgacacgtacagaatttgggttgttagggcactataacaaatataagaaatcgccattcggtacattcgacgtaggtggtgacggtatgactggttactcaagttatgcaacagaaagtattgcattgcgtggttatgaaaacagttcattgacaccatatggaaaagaagggtatgcttatgcacgcctcggcatcgaattaagatatccgttgatgctggaaacaagtactaacatttatgtgttaggtttcttggaggctggtaacgcatggcatgatatctcaaaattcaatccgtttgatttgaaacgttctgcaggtgtcggtgttcgtatcttcttaccaatgattggtatgatggggattgactggggatacgggttcgataagattgacagtagaagcgattacggcggaagccagttccactttattttaggacaagaattctaatataaaactaaaaactaaacgtcatgagaaagtctgttctatccattatgttactgtttgccatcagtatggcagctagtgcacaaaaatttgcattgatcgatacggaatatattctgaaaaatattccggcatatcaaagcgctaatgagcaattgcaggaagctacgaagaaatatcaaagcgaagtggaggtaattgccaaggaagcacagaagatgttccaggactatcaagctcagtcctctactctctctgcggctcagaagactaagaaggaagatgagattgtagcgaaagagaaatccgctgccgaactgaagcgcaaatacttcggtccggaaggcgaactggctaagatgcaggagaagctgattaatcctattcaggatgaaatatatggtgctgtaaaggaactgtcgcaactacacggatacgaccttgtactcgacagagcctctgctgcaggcatcatttttgccaatccacgtattgatattagtgatgaagtgctgagaaaattaggatattcaaattaatttcatacatttgcatcgaaaataactaaaaatcattcaaataaattatagaactatgctaaaaaaaattgcacttgtattgatgcttgcactcccaatgggtgtatttgcacaaaatctgaaattcggtcatattaatgcccaagaaatcgtttcagcaatgcctgaatttgctaaggcacaatctgatattgaagcactagacaaacaactgaccagcgaattacaaagaactcaggaagaattcaacaagaaatatcaggaattccagcaagctatcgctaaggactctcttcctgctaacatcgctgagagaagacaaaaagaactgcaggatatgatgcaaagacaagagcagttccaacaggaagctcaacagcagatgcaaaaagctcaggctgacgcaatggctcctatctacaaaaagttggacgacgcaattaaagctgtaggtgctgccgaaggcgtaatctacatcttcgaccttgcaagaacaccggttgcttacgttaatgagtcacaaagtattaatctgactcctaaggtaaagacacagctcggcatcaaataagaagctataagctataaaataccgaaagggaaagagaaaagaagatcatacttctttctctttcccttttttcatgtaactttgcgtatataaaaccgcactcgtcatgaagcaacatctatctcatacacccggaccaatcggagttttcgattccggatacggtgggctgactatcctcaacaagataagagaggcactgccggaatatgattatgtctatctgggagacaatgcacgcactccttacggtacacgttcttttgaaatcgtgtacgaattcactttgcaggcagtcaataaattgtttgaaatgggatgtcatctcgtcatcttggcctgcaatacagcctctgccaaagcattgcgcagcatacaaatgaatgacttgcccggcattgaccctgaacgccgtgtactcggagttatccgccctaccgttgagtgtataggcgacattactcaaagccgtcatatcggagtactggcaacagcaggtaccatcaagtccgaatcgtatccattggagatacataagctattcccggatattcaagtgagtggaatggcatgccccatgtgggtaccgctagtggaaaataatgaatcacagaacgaaggggctgattatttcatccggaaatacattgaccagctgctatccaaagatcccgaaattgatacgatgattctgggctgcacgcattatcctatcttgctccctaagatacaaaaatacactccgaagcatatccgtattgtcgcacaaggagaatatgtagccgaaagtctgaaggactacctgagcagacacccggaaatgaatgccaagtgtacccaaaacggcagttgtctgttttacaccacagaagcggaagagaagtttgtcgaatcggcctcttccttcctgaaccagcaaatcgacgtaaaaagaatttctctcgaataaatatgggaaagcagatcaatctttccttcttttttgttatatttgtatacataacctcaaatagcataagattatgaaagaagaagattatagcagggccatagaagtattctctggttctccatgggaagcagaaattatcaagggattgttggaaagtaatgatatccgctgcgtcattaaagatggtatcatggggacattagccccctatattgctccatctgtatctgttctggtcactgaagaccagtacgaagccgctactgaactgatcagaagccgcaacgagaaagatactgactgatacggtccagtccttcccggatattctccagcgaattcgcataggagaaacggacatatccttcgcctcccgttccaaaatctataccgggagtgatgccgacatgcgcattttcgagaacatcgaatgcaaagcgataagagtcggtagtgaacttacgtgcatcagcgaaaatataaaaggcaccctgaggctcaactttgatctcaaatcccatttcccgaaggcggctgatcatataccggcggcgttcatcatagatctgtttcatccgttccacatccgagtcagcctgtcgcaatgcggcaattcccgcttgctgagcgatgctggacgcacagataaacagattctgctgcaacttctgcaaagaacgcatgcaggatttcggtgctatcagataacctaagcgcagccctgtcatcgcaaaccgcttggaaaatccgttcaggacaaaagccttatccgtatattccagaatactatgcgcacgtccctcgtataccagtccgtgatagatctcatccgaaataataggaacgcccaaagatgccacacttttcaggaaattctcatccagcaacatacccgtcggattcatcggcgaattaataaaaatacctgccgtatacggagtaacgcacttacggatcgcctctatatcatattgcaaaccattctcttcggacagaggcaccaagacaggttttgcctgggcagccaacacgaagttacgataacacgcatatcccggattggacagaatcacttcactgtccgagttgcaaagcaacatcaagaccagaaggatagagggagaagaaccggaagtgacgacaatacaatccggatcgacggtgactccatattcacgttgataaaaagcggctatttcacgacgcagttccggattccccaaagagtgagtataatgtgtgagatgccggtcgtaggcagccttagcagcttccgccacacaaaccggaacgtcaaagtccggctcaccgacttccaggtggataacgtccacaccttgtttctgtaattcatttgcacgctccaatacatccatcacgataaaggaggtcatttgttctacttggggattcgtatgtttcattgtttttcttttatctgtcaggctgcaaagataattcttttcagcctgtttttgtaacatatcgacaaaaagctctatatttgtactttcaaatcgttagtaaggatgaaacaagagtttacacgaatagcagtaaaagtaggcagtaacgtattggcacgccgtgacggtacattggacgtcacccgtatgtcggcactcgttgaccagatagcagaattaaataaatccggagtagagatcattcttatttcttcgggagctgttgcttcgggacgcagcgagatacacccgcagaaaaagctcgacagtgtagaccagcgccagttattctccgccgtaggacaggctaaattaataaaccgctactatgagcttttccgtgaacacggcattgcggtaggtcaggtactgactaccaaagagaacttcagtacccgccgccattatctgaatcagaagaactgtatgacggtgatgctcgaaaacggcgtcatccccatcgtcaatgagaatgatacgatttcggtcagcgagcttatgttcacggacaatgacgagctttccggactgatcgcttccatgatggatgcgcaggcattgattatcctgagtaacatagacggaatctacaacggttcaccctccgatcctgcctccgctgtcattcgggagatcgagcatggaaaggatttatccaactatatccaggctaccaaatcgagtttcggtcgtggcggtatgctgacgaaaacgaatatcgcccgcaaggtagccgacgaagggattacagtcattatcgccaacggaaaacgggataatattctcgtagacttgttgcaacaaccggacgatacggtttgcacgcgctttatcccttccaccgaggcggtatccagtgtaaagaaatggattgcccacagcgaaggattcgccaaaggggaaattcatattaacgaatgtgccacggatatactcagttcggagaaggcagccagcattcttccggtcggaatcacccacatcgaaggcgaatttgagaaggacgatattgtacgcatcatggacttcctgggcaatcaggttggtgtaggaaaagcgaactgcgattccgcacaggccagggaagcaatgggcaaacatggcaaaaagcctgtagtacattacgactatctgtatatcgaataaaaaatataaaacgtaaaaaggagcaaatgactacaaatttaaacggaactttcgctgctgtacaagctgccagccgggaattggcgttgctgagtgacgacaccatcaatcagatactgaatgcggtcgctgatgctgccattgccgaaacaccctttatcctgtcagaaaatgaaaaggacctggcacggatggacaagagtaacccgaagtacgaccggttaaaactgacggaagagaggctgaaaggcatcgctgccgacacacgtaatgtagccactctcccctccccgctgggaaggatattaaaggaaacctcccgccccaatggaatgaagctgaccaaagtcagtgtccccttcggagtaataggcatcatctatgaagcgcgtcctaatgtcagcttcgacgtcttttccctttgcctgaaaagcggaaatgcctgcatcctgaaaggtggaagtgatgcggacgattccaaccgtgccatcatcagcgtcattcacaaggtacttgaaaagtttcatgtcaacccgcatatagtagaactgctcccggctgacagagaggctacggcagcattactgaatgcgacaggctatgtagacctgattattccgagaggaagcagcaatctgataaatttcgtgcgcgagaatgcgcggattcctgtcattgaaacaggagcaggtatctgtcacacttattttgatgagttcggagatacccggaaaggagcggatattatccataatgccaagacacgccgtgtcagtgtctgcaatgcgctcgactgcaccatcattcatgaaaaacgtctgggagatttgcctgtgctctgcgatcaactgaaaaaaagcaaggttactatctatgcagatacacaggcttatcaggcactggaaggacattatccggctgagttgctgcaacctgccaccccggaaagcttcggaagagagtttctggattacaaaatggctgtcaaaacggtgaaaagttttgaagacgcactggggcatatacaggaaaacagttcaaggcacagcgaatgtatcgtgaccgaaaacaaagagcgtgccgccttgtttactaagatagtagatgcggcatgcgtatataccaacgtatctaccgctttcaccgacggtgcacaattcggcctgggagccgaaatcggcatcagtactcaaaagctgcatgcccgcggtccgatgggactggaggaaatcacttcctacaaatgggtgatcgaaggcgacggacagaccagatggtaaagtgaggaaacgacaaatgatcaattggacaataacgattaatgatagataaaatgaagaaatttacttgtgtacaggacatcggcgatttaaaatcagcccttgcagaagcatttgaaattcaaaaagaccgcttcaaatatgtagagttgggacgaaacaagacattgatgatgatcttctttaattccagcctccgtacccgcctcagcacacagaaagctgctcttaatctgggaatgaatgtaatggtgctggacatcaaccaaggtgcatggaaactggaaacagaacgtggcgtcatcatggatggtgacaaaccggaacatctgctggaagcgattcctgtgatgggttgttattgtgacatcatcggagtacgttcctttgcccgtttcgaagatcgtgattttgactatcaggagactattctgaatcaatttatccaatattccggacgtcctgtcttctcgatggaggcagctacccgccacccattgcagagctttgccgatttaatcaccattgaggaatataaaaagacggcacgtcccaaagtcgtaatgacttgggcgccacatccccgtccattgccacaggctgttcccaactcctttgcagagtggatgaatgccactgactatgatttcgttatcactcacccggaaggatatgagctggcacctcaattcgtaggaaatgccaaggtagaatatgatcagatgaaggctttcgaaggagcagactttatatacgccaagaactgggctgcctatacaggcgacaattacggccagatattaagcaaagaccgtgaatggacagtcagcgaccgacagatggcagtaaccaacaatgctttctttatgcactgcctgcctgttcgcagaaatatgatcgttacggatgatgtaatcgaaagtccccagtctatcgttatccccgaagctgccaaccgtgaaatctcggctacggtggttttgaagagattgattgagggattggagtaaacggaacatctgtgaatgaaaccttacttttattctcgcacctatgagaaaagattctcatgcctttgagaaatttttctcataggtatgagaatcttttctcattgtggtgagaactttttctcataagcatgagaatacattgagaatatagcaacatatatttgattgtatactagcacgataacgattgcatcccttcagaatttcatgtagagcgtaaccatttattctagaatagacagtaaaaagccgtacaacaaccttagtattctatctcctttcctgccgcctgccaggcattgaatcctttaccaagctccacaaccttatatcctttttcactaaggatcgcagcagctttcttgctccgtttaccgctacggcaatacaacgcaaccggtttgttcttttgcaacaatgaatccgccatcgaggcaaaagagtcatccatcacatttatattgatcgtttttgcaatatgtccttctgaatattcagccagtgtccgaacatccagacgctgcacttcttcatcctgaatgatagaatcgaaatcctctacattcaccgttttaaagtctcctttctgctgacaggagaaaagagaagagagaaataaaaataatcccacgactaattgattcattttaaacatatgtactatcttaatcagttcacgcccggaacatattcaaatcccggatcacaatacttgcttgattctaccaccacaccacttttatctgtggtatgatacttgaattttatccttatggtttgatgaggattttcttcatccacatatttcgtcagaggaacagaaatgtaggcacggcgattatagttctcctcatccccattcgcatcatgaaacagagacaaggttacgactgtctcatccccttccgcctcaacgctctcttctatcataccaaacacgtgctgtttgccactattgatattgatcttcacgttcagaatcatattcaaatagtcacgccccagccaaatgctggtcacatctaccggatcatacttcagtccgccttcgaaagccggatcgtcagccccctttggctccggtgtcaccaccgactgcaatgagtatatgacagccgtagcatcctccggatttacttcatagttactgatcacacgcctagccgagttcggagaaatggttgatccggtacggtctttcgcaacagtcaacagctctcccttgtcaggaagcagactctgtatcagaccatccgccccagccttcactgtgacaaattccaacttcacagaaggataatagtaatcatcatccccgcaggcagtcatcaggaaaagcattcccaaaagccagagtgtatgtaactttactttattcattggcaagcagctaaatagttcaccaacggattggcatacattaataacaattttccacgcaaaaagtcttcgtctttattcggaatctttattttgcccagttgttgctcgatataggtaacgaatcgttgtttctcttcgggagtgtaatgaccggcaaactcggatgtacccttcagcaagtcataggcaacgtaattgcccgaatagatccgatagttactatgaatcctctggtcgatgcaggcagatatgctggagaacagttcctgcttcggtaacgaacggtccagctgcgccaacctgtcattgatacagggagccgtctgaaaatgcactttccctttgtatccgaaaagaccggtctgcatactgatcaaatcgtcctgagtggttttcttatatccttctatatctcttttcaactgaaactcctgcgctttcagaaagtcacaggggtcatattcgtacgaaatggcaagaggagcgatgttcatctccatcaaacggtcgatcaagtcaccttcaccacccatcgccagcatcttcagcacgctgtcctgagtacggtcgttcgagtctttggcacgtccttcgcgctgggcaatccagatggactgcttcttctcactaatggtataatgcatataacgggacatccgtgccgaagattccagcatctgccgcatagtcagcgcccgttgtacaataaacgacttgttgacacgcaccagcttcttgatccacggataaaccagcagattgtcaccaatcgctatctcaaccgtatccatcccctgatcgatcagcaagatagagaggaagcccgaatccaatataatatcccgatgattggagagatatgtataagccttgctcttatccggcacagccgtatgatccagagtcagcccatccgtatggtccgccgctattttccataaaataccataacagaatgtttcctgaaaatccagcttgctcttacaggcacgtattttctgcgccaaaagttcaaaggggacgttcggtatcgcatcagtagccgccttctgaaaagcaggatcagcaatcagctcctcaaagatttgaggaagttcctcatcattataaggacgaatctcatcaaactctgtagtatccataagctatgaagtttataaataagtattaggtattaagtattaggctgcgctgtaaaccgcatggaattaatacttattacctaatacttaatacctaaaatttattttctattatatcagtcatcacatcctttatatccagtccggcagcacgcacttgctggggaataaagcttgtagtggtcatccccggagttgtattcacttccagcagattgatcttttcgccggcagtcacaatataatccacacggatgataccggaacagcccaatatgtcataaatggccgaggtcagcatttgcacgcgattcgtcagttcgtccgagatgcgtgcaggagtaatctcgtctacctgaccattgtattttgcatcataatcaaagaactcattatgtgtcaccacttccgtaggcgggaagatgacggtcttgtctttggttttatagcagccgcaggttagctccgttccttccatgaatgcttctacgagcacttcctgggcttcttcaaaggccttaacaatggccggctgtatttgttctttcgtcttaacctttgttacgccgaagctcgaaccgcccagactcggcttgatgaaacaaggcaaaccgatcttttccatcacatcttcgtcggaaaccgattgtccctgacgcaatagcaacgattctgcaatacgcactccgaaggctttcaggtattggttgcaggtaaacttgtcataggtgatcgccgcagccagcaccccgcaacaagagtatggtatgtgcatcatgtcaaagtatccctgaagacggccgtcttcgcccggagtaccgtgaatggtaatataggcaaagtcaaacctgatcttttccgttcccagcataaagctgaaatcattgcggtctaccggtgcttttgcaccatccggcaattgtacttcccaacgggtcccctgcatctcgacaatgtacagtgtgtacttttccttatctatgaaggaatatattccctgtgcactacgcagggatacatgaaattcggaggtgtcacctccggctacgatagcaattgtgcgtttcattctatttctctgttacttatatagcctcgccacttctcgataagctgggtcatgtcatccggaagttcggaagtaaagtacatctcttcgcctgtgacgggatgtacgaaccccaatgtcatggcatgcagagcctgccggggacaagtgtcaaagcaattatttacaaattgtttgtatttactaaagtgagtacctttcagaatttcgtgaccgccatagcgttcgtcattgaaaagtacatgcccgatatgtttcatgtggacacgaatctgatgagtacgtccggtttcgagtatgcactctaccagcgtgacatatcccagccgttcaagcacccgataatgagtgaccgcgtgcttgcccatcgacgggtcggacataaccgccatctgcatccggtctttcggattacgggcgatactgcctacaatcgtgccttcatcctgttccacatttccccaaacaagggcacggtatctgcgtttggtcgtcttattaaagaattgtattccgaggttggtcttggcatccggcgtcttggcaatcaccagcagaccggacgtatctttatcaatccggtggaccaggccgacgtgcgggtcattggcatcatattcaggaatatctttcatgtgccatgccaacgcattgacaagcgtaccgtgatagtttccgtgtcccggatgtactaccagtcccgcaggcttgttcactaccattacatatggatcttcgtaaacgatattaagggggatattttcgggaataatctcgttctcataacgaggacggtccatcatgacggtaatgacatcgagcggcttaaccttgtagctgctcttcaccggcttaccgttagccatgacgaatccatcttcggcagccttctgaatacggttgcgcgaagcattgacaatacgttcgaacagatatttgtcgactctgaccatcgcctgtcccttgtctacgaccacccgaaaatgttcgtaaagctgggattcgtcaccgacaggttctatatcatccaaatcattctccagttcatccggaagttcttcctcgatcatgtgaatctgtttcgttatttatcaattaaaaccaactatcatcctgacttgaaggggattctgaggaaacaggttcatctgccccttcaacattttccatggagtcgctttccaacggttcgttttctccgtttcctaccatcagtgtcaatgcagctcccaaaggtactttatctcccgcattcaatgagcgcccctgatatttaatgccgtacacccagtccttctcaccgttcatcaactgaatctcggtcagcttgaatccggcagcaagcactttcgcctgtgcctggcgcagagaactgttgtccgccacatcgggaacagcacgtaaaggaatactcagtgtattgatagtcaggtaaatggtgcggccttctttcactttttgtccgattcccgggttgacatcaagtacaatgccagctgccatattcttcacataattagaatcggaaacgacacataccaatccgtgattgcggaacatttttgaagcttcatccacagtcatcccttttacatcgggcacaaccaccgcctcaccgtgacgagtataaacatccagccatttcatcacgccgaacacaatcagcaccactgccacaatcatgacaaggatattcacccagaaatatttatttgttttaaaagaaaagaattctttgattgtcatacgctttgctgttaatccgcgccaaagatactacaaattagttgaatttcggaatagtgggcaatgaaaatgtccctgcataaatgcaaggacacctgtcatcaccacaattgttgcaactatattccccactcctatagatttcaacaaccttatattctaggatgcggcttccggattctctgagcacaaccgtctgtcgcatatattccgtctatgatctgtgacaaagaaagctaaaaagtgacaaagagcattccattaaacattatttaatactctatttaactactgtgccaagagtcctgtactttttatcataaaaaggaagttataaccaactttaatgaaaatagaagcaaacaaaaaaggcggagtttaaaactccgccttttttgtttctgagtgatgattaccacttctgtccgttgtactcatcagaaacagtcagtttctttctgcctttcgcacggcgagcagctaatactctacgaccattagccgatgccattctctcacggaaaccgtgtttgttctttctctttctgttagagggttgaaatgttcttttcattactgtatcttgtttttatgttattattctacgtaatcgggctgcaaaaatagagactttttttaaattaaccaagcgataagtcatttttgctcaaaagtttttgtgttttttactgatttagattacttttgcactcgaattacgacgaagacaattaaataacaataatataataagaaaaacagcagtatgattaatgctcaagacatcaaaaacggaacttgtatccgtatggacggaaagctctatttctgtatagaattcctgcatgtaaaaccaggtaaaggtaacacatttatgcgtaccaagctgaaagacgtagtaagcggttatgttctcgaacgccgtttcaatatcggtgaaaaactggaagatgtacgcgttgaacgtcgtccataccaattcctgtataaagaaggagaagactatatcttcatgaaccaggaaacttttgaccaacaccccatcgctcacgacctgatcaatggtgtagacttcttgctcgaaggtgcagtgctggacgttgtttctgacgcttctaccgaaactgtactttatgcagacatgccgatcaaagttcagatgaaggttacttatacagaaccgggaatgaaaggtgatacagccaccaacacactgaaacctgctaccgtagaatcaggtgcaacagtacgtgtgcctttgttcatcagcgaaggtgaaacaattgaaatcgacactcgtgacggttcttacgtaggacgcgtaaaagcataaatgtcatacaaatgacataaagaaacggtggatttgcttcggcacttccaccgttttttattacctttgtccatcactaaccctaatattaagatacaaaagaatgaaaaagttgatttacacactgctctttgtccttatttccgttgcagccaacggtcagcaggcaaagtatgtattctatttcatcggagacggaatgggagtcaatcaggtaaatggtacagagatgtatcaggcagaactgcaaaacgggcgcatcggcgttgaacctttattgttcacccaatttccggtagcaacgatggcaaccactttctccgcgacaaactctgttaccgactctgccgctgcgggtactgcactggctaccggaaagaagacctacaacagtgccatctctgtaggagaagacaaaaacccgatcgaaaccgtagccgaaaaagccaagaaggccggaaagaaagtaggtgtcactacttccgtcagcgtagaccacgccactcctgccgctttctacgctcatcaggcagaccgtaatatgaattatgaaatcgctgtcgacctgacaaaagcaaactttgacttctatgcaggcggtggttttctgaaaccggacaagacgtatgacaagaaagacgctcccaacatcttccctattttcgaagaagcaggttacaccgtagcacgtggctacagcgattataaagccaaaagcaaggatgccggcaaaatgatcctgatacaggaagaaggcaaagatccatcctgcctgccttatgctatcgaccgtaaaagcgacgacttgactctcgcccaaatcacagaaagcgcaatcgacttcctgaccaaaggcaagaacaaaggattcttcttaatggtagaaggtggaaagattgactgggcttgccacggtaatgacgccgctaccgtattcaatgaagtaaaggacatggatgacgctatcaaagtagcttacgaattctacaagaaacatccgaaagaaacactgatcgttgttacggccgaccacgaaaccggtggtatcgtactaggtacaggcaaatatgcgttgaacctgaaagcattgcaatatcaaaaacattctgctgacggattgtccagacgtatcagcgaactaagaaaatcaaaaggcaacaaagtgacttgggaagacatgaaagaattcctgggtgaagaaatgggcttctggaaacagttccctatttcctgggaacaggaaaagaagctgcgtgacgagttcgaacaatcctttgtcagaaataaagtggtatttgccgaaagcatgtactctaaaagcgagccgatggctgcacgcgctaaagaagtaatggatcagatatctatggtaggctgggtaagcggcggtcactctgccggttatgtgccggtatttgccatcggtgccggttctcaactgttcggtgagaagattgacaatacggaaattccgaaacggatagctaaagctgccggatataaataaagaattgactgcacgaatatgtaatcaaaacactatttattttcatttaggcacggatttcacggattaacacagttctattcaattaaagaccgtgaaattcgtgcaatccgtgcctaaataatattatcattataatagatgattttcattgggtcccttctcttgatatgtttcccgttaggaaacgggcgttccctcaccgagaaacgagagttacctttaaaggaaacgatcgttcccacaccgggaaacgacagtttccaaagcaggaaattcatggaaactctaagccattgatgtgtactggttttagttgacaacttcgtttgttataactgaattagtttactcaatatactttaatatctaaataggtttacttttgttattcttattcctatgttagttgtcttttgttggtgcttgcaaatttatgcatcttcctttatttacgcaagccttcttcaggaaaatgtaatgttgccaacaaccaaaaactcttcggtcggggatcgccctagcggcaaggggcgggaccacccgtcccgacgagcgggtattatgctgttaatcctcccgtttcgctgaccacttccataggtgtcctcatgtttatcccttgatgaggccgcacatgattatatacatatacagcatcttcaatgcgcttgcttacttgctcgaagctctcatcatcacagtcgaatagccaaccgtttttaatggtgttgttcattctttcagccaatgcattatgtaaaggatcaccacactgcgtcatactgatgttgatttgatgctctttaagcctctctacatatttatttgagcaatattggacaccccggtcggaatgatgaataagagtgctcatgtctatgtgatacttctcatagaatgatattgccatctccaaagctttcaagggcccctccgtctcaagagttttgtaaagcgcatatcccacgatggcacgacttgacgcatcggtaagcaacgagaggtaagcccagccctgaccggtgtttacgtaggttatatccgccactaccatagcgcccaatcttgtagcgacaaatttgggtgcaacattcaacagatcggggtagatatagtaattatggttcgaattcgttgttttaggacgcttgcgacttgtacgttgacacaaaccattggagcgaaaaatgtcatagcaacgatcacgaccgataaccatctttggtccaaacttactcacgcagcaggcgtataactcgcgcataccagctttgggcatgagttccaacagttctttgcagtacaacacgatgcttgtggtaaggatatcaacctccaaatgtcggttcacatgcttgtaataaccttgtcgggttatgccgaagtaatcacagaggaactttatacaaccacgtttgcgtcggggtgagtgcctctgtgacaaggtgtcgattacttggcatcggagttttttcgtaccttgatatgatacgtggattcagcaagattgatgagttcttcgcacgcctcgtgacgtaaactctcatcagcaagagcccgatgaagtttacggttctcagcacgcaatagcgatagttctttctggagctcagaaatactagaatcaatagcatcgctatttactggtttagaggatctacccatatctttgtcttctatttgatacttgttaagccaataagtaagaagcttggcacaaaagccgtgacgcttacaaaactcagatttgctctcgggacttgataaatactcacgaatataagacattcgttcatcatcactgtaatagttgtactgctttttcgaatatttcatctttattttcgatttttgaagtgtcaacttattcagtacactacacattcatatacaatcaattagtcatatcatacctatgtctattggagacatgaagagagactagagtgtacttacaaattcattacatcctgttcgaaccgatctttatctccggcagctttattgcgcattctgctccggtaattatagatagttgccaaagaataacccagaaaatgagcaatcttgttactatccactactcctaaacgaataagggcaaagatccggagttcggttgtcagcagttcgtctgattttggataaactcttgcttcttctaccagcagattattgaaagaagtaataaagtgtgggaacagtttaaggaatgacttatcaaattcgttataaaattcattccgctcgtcccggataaactgttcggacttgattgctttaaacaagtcatcgatacgtgacgacatagcaagtttggccagagagcggcgataagtttccagtttatctagataattgacgcatctgtccaaataacgggcaatatatacttcctttatctttccggtctgttccaattctttgttgaccgcagacatttgtttgttggccaaacttagattcctacgcatgacggatattttcttcatccaacgatacagatagaaaatagcaatgaggagaaacagcgacaacagactgacactaatcaacatggcacgggaaacggcccgttctctctcttctttcagtttataagccttatcaataatcgggaaaaactccgtcacttccataaatcgcaaacgggcattacatgctacagcatcttccatcgaacaactcagatatttgtaagcacggtcaatatcccctagttcatacatcagatgcgcgagtttctgcaaggaagcatactccctgacggaagattccaagtctgcaatagcagtcagtatcagataataaacttctttctcaacgtctttcttcatgctatatgcttcggaaagggtataatagatatatactttctgacgttcgtcttccatatctttcagtgcatcgttcagcatgccgatagccgtatcggcctttccggtcacgatacatcgttccgccataacaatcgttttattttcttccggaggcatggcggcgataatggaatctctgtacaaatcggtctttttcaggtatttttctttttcggttttgtttgtcgtataatcagcgagccagccgtagcaggcgcgatatgtctggtaataagaaagcaaagtccattcattcagttttttaggatcaatcttctccaattgttccatagcttcgatgtacatgcccattacacccattaccgtagcacggttaatgacaatctcatattccagttccggacgatttaattggggcaatatctccatctgacggttaatataatgaagcgccgaatctgcctgataatgaaggtaagccccaaagagggaggcatacaactcataattccgggcaggatcggtggaatgggcaagttgtacttttaaatcagtaatgtctttttctctccgtatctgataagtttccttcttacttataatgtcatccagttttttaagggccgccttatttatatccgtatgctttgcggacaaggaaagaggataaacaaaaagaagaaacaaaagataataggttagatttctcataaggtgcttttttaagatgtgacaaatataatgattatagtaataaaaacgaaaaatatcgccataacaattttcattttcacttgtatttttcgacagaggcaataacgataaaaagcttattatcaacagcctattcaaaacaagcatttatattttctttctaactgccatacggcatacccgattcacctacatttgcatcatcggttcccccgaacaaattttaaaaatctagttaccatgaaaaggaatttattattcattatcttactattattattacccggtcttcaccaggtattcgcaacaagcactataaagaaagtagccccgaccttttggtgggcaggaatgaagaatcccgaattgcagatactattatatggtgaccgcatatcatccgcagacgtcagtctttctgccgataatatcacgctgcaagaagtggtgaagcaggagaatcctaattatctggttctgtatttagacctttcgaaggctgctccacagaactttgacatcatcctgaaacaaggcaaaaagcagacaaaaatcccttacgagcttaaacagcgccggccgaatgcttcggcagtagaaggttttgattcgagcgacgtgctttatcttattatgccggaccgttttgccaatggcaacccctccaacgacatcattcccggaatgctggaaggaaatgtagaccgtaatgagcctttcgcacgtcatggcggcgatttgaaaggaatagagaatcatctggattacatagcagacctcggagtcaccagtatatggctcaacccgattcaggaaaatgacatgaaagaaggatcgtatcacggttatgccattaccgattattatcaggtagaccgccgcttcggcagtaacgaagagttccgcaaacttactcaggaagctaatgccaaagggctgaaagtcgtaatggacatgatcttcaaccattgcggttcggacaactatctgtttaaagatatgccctccaaagactggtttaactttgaaggcaactacgtgcagaccagcttcaagactgccactcaaatggacccgtatgcttccgattacgaaaagaaaatcgctatcgacggttggttcacactgaccatgccggacttcaaccaaagaaaccgtcatgtagctacttatctgatacagagcagtatatggtggattgaatacgccggtatcaacggcatccgtcaggatacacacccttatgccgacttcgatatgatggcacgctggtgcaaagcggtcaatgaagaatatcccaagttcaacattgtaggtgaaacatggctgggcaacaatgcactcatctcctactggcagaaagacagcagactcgcttatccgaagaacagcaatctcccgactgtcatggacttcccgctaatggaagagatgaacaaggctttcgacgaagagactaccgaatggaacggaggacttttcagactctacgaatatctatcacaggacatcgtctacagccatccaatgagcctgctgaccttcctcgacaatcacgatacttcccgcttctaccgttcggaagcagatacaaagaatctggaccgatacaagcaagccctgacattcttactgacaacccgcggaataccgcagatatattatggaactgaaatcctgatggcagccgacaaggcgaatggagacggcctgctccgctgcgacttccccggaggctggccgaacgatacaaaaaactgctttgacgcagccaaccgcactccacagcaaaatgaagcattctcctttatgcaaaaactgctccaatggagaaaaggaaacgaagtcattgccaaaggtcagctcaaacatttcgcaccgaataaaggtgtctacgtttacgaacgcaaatacggtgataaatcagtcgttgttttcctgaatggaaacgaccgggaacagaccattgacctggttccttaccaagaaatacttcctgcctcatctgctttcgatttattgacagagaaaaaggttgaattaagaaatgaattaacacttccaagtcgtggaatataccttttatccttttaataagttcacttcgacttatatttatcagaatacagaaaagaaataaaccactgtaaaacaaaacattaacattaatataaacttgtatttttattctagacaacccaaagtctcaagatggttgctatatttgcaatatccggaacagagcggagtaaaaatattagttagcttataatttaataccataaatagaatgaaaaagagaaagattttatcgctcatcgcattcctttgcatctcattcattgcgaatgcccaacagaaattaacctcaccggacaacaatctggtaatgaccttccaagtagactcaaaaggtgccccaacgtatgaactgacgtataagaacaaagtggtaatcaaacccagcactctcggactggaactgaagaaagaagataataccagaaccgacttcgactgggtggaccgcagagacctgacaaaacttgactcaaagaccaacctgtacgacggcttcgaagtaaaggatatccaaacggctacttttgatgaaacctggcaaccggtttggggagaagaaaaagaaatccgcaatcattataacgaactggcagtcaccctgtatcaacccatgaatgaccgttctatcgttatccgtttccgtctgttcaatgacggtctgggattccgttatgaatttcctcagcagaagtcactcaattacttcgtgatcaaggaagagcattctcagtttggcatgaacggcgatcatatcgctttctggataccgggtgactatgatacgcaggaatatgactacaccatttcccgcttatcagaaatcagagggctgatgaaagaagcgatcactccgaactcttctcagactcctttctcacagacaggcgtacaaactgcactgatgatgaaaacggatgatggcttatacatcaatcttcatgaagccgctttggttgattactcatgtatgcacctcaatctggacgacaagaatatggtattcgaatcctggttgacaccggatgccaaaggagacaaagggtatatgcagactccctgcaacacaccttggcgtacgattatcgtgagcgatgacgcccgcaatatcctcgcttcacgtatcactctcaacctgaacgaaccatgcaagatagcggatgccgcttcttgggtaaaacccgtgaaatatatcggcgtatggtgggacatgatcacaggaaaaggctcatgggcttacaccgacgaactgaccagcgtaaaactcggtgaaacggattactccaaaacaaaaccgaacggcaaacattctgccaacacagccaacgtgaaacgttacattgactttgcagccgctcacggattcgatgcagtactggttgaaggctggaacgaaggctgggaagactggttcggcaacagcaaagactatgtgtttgatttcgtgactccttatcccgacttcgatgtgaaggaaatccaccgctatgcagccagcaaaggaatcaaaatgatgatgcatcacgagacttccgcttctgtacgcaactacgaacgccacatggacaaagcctaccagtttatggcagacaatggatacaactctgtaaagagcggttatgtaggcaacatcatcccccgcggcgaacatcactacggacaatggatgaacaatcactacctgtatgcagtgaagaaagccgccgattacaaaatcatggtgaatgcacacgaagcaacccgccctaccggtatctgccgtacatatccgaatctgatcggtaatgaatccgcccgcggtacagaatatgaatcattcggaggcaacaaagtatatcatacaacgattctgcctttcacacgcctggttggcggtccgatggattacactcccggcatcttcgaaacgcattgcaacaagatgaatccggcaaataattctcaggtacgttctaccattgcacgccagttggcactatacgttaccatgtacagtcctttgcagatggctgccgacattccggaaaactacgaacgttttatggacgctttccagttcatcaaagacgtagctctcgactgggacgaaacgaactatctggaagcagaaccgggagaatacatcacaattgcccgtaaggcaaaaggtacggacgactggtacgtaggctgcacagccggtgaaaacggtcatacctccaaactcgtattcgacttcctgactccgggcaaacaatacatcgctaccgtctacgcggatgccaaagatgccgactggaaagagaacccgcaggcttataccatcaagaaaggtattctgacgaataagagcaagctgaacctgcacgcagctaacggaggcggatacgctatcagcatcaaagaggtaaaagacaaatcagaagctaaaggtttgaaaagattataataaggaaaagaaataacaaagatagagaatatacattttggtaaaaaagagagtgttttcgagcactaagaacaatgacgaagagaaggttttcaataggtatttttaagagagaatgataagagaaattacaattaactttaaagacaaaaacatgaaaaaaggaaactttatgttcaaggtcctgcttatgcttatagctggaatattcttgtccattgacgcatttgctcagcaaattactgtcaaaggaatagtgaaagacacaacgggtgaaccggttataggtgccaatgttgtggtgaaaggcactaccaccggaacgattaccgatttcgacggcaacttccagttgtctgccaagcaaggtgacataattgttgtttcattcatcggataccagccaaaggaacttccggcaaccacacaaatgaatgtaatactgaaagacgatacggaaatactggacgaagtagtagtcatcggttacggtcaggtgaaaaagaacgatatgaccggttcggtaatggctatcaagcccgatgaacttagtaaaggtattacgacgaatgctcaggatatgttatccggtaaaatagccggtgtcagcgtgatctccaatgacggtacaccgggcggtggcgctcaaatccgtattcgtggcggttcttcattgaatgcaagcaatgacccgctgatcgttattgacggtctggctattgacaacgaaggtatcaaagggatggcaaacggtttatcaatggttaaccctgcggatatcgaaacccttactgtactgaaagatgcctctgcaactgccatttacggttcgcgtgcatccaacggtgttattattatcaccaccaagaaaggaaagaacggacaagctcccagcgtaagctataacggttctgtatccttctccaaaactcaaaagcgctatgatgtattgagcggagatgaatatcgcgcttacgccaatcagttatggggtgacaaattaccggcagatttaggaaccgccaatacagactggcaggatcagatattccgtactgctgtcagcaccgaccatcatgtttctatcaacggaggattcaagaacctgccttaccgtgtgtctttaggttatacggacgataacggtattgtgaaaacatccaacttccgacgcttcactgcttccgtgaacctggctccttccttctttgaagatcatctgaagttcaacatcaatgccaaattcatgaacggtaaaaaccgctatgccgacacaggtgccgctattggcggggcattggctatcgaccctacccgtccggtttattctaacgaagacccttaccagtttacaggcggctactggcagaatataaattctaccacaggcttcagcaatccggactggaaatacacgtccaatccgaactctccccaaaatccgctggctgcactggaactcaaaaatgacaaggcgaacagcaacgactttgttggaaatgtagacgttgactataaattccatttcctgcctgacctccgtctgcacgcaagcataggtggcgaatatgcggaaggtacacagactacgattgtttctccatactcattcggcaataattattatggttggaatggcgacgttacccaatataaatacaacctttcgtacaacatatacgtacagtatatcaagtctttgggtgcaaacgactttgacatcatggtcggtggtgaagaacagcacttccatcgcaacggatttgaagaaggtcagggctgggattcctatacgcaagaaccccatgacgccaaattgcgcgaacagacagcttatgcaaccagaaatacactggtctcttacttcggccgtctgaactactccctgctgaaccgttacttgtttacctttaccatgcgttgggatggctcgtcacgtttctccaaagataaccgttggggtacattcccgtcattggcactgggatggaagattaaagaagaaaacttcctgaaagatgtaaatgtcctgtctgatctgaaattgcgtttaggctggggtattaccggtcagcaaaacataggtgatgattttgcttatcttcctctgtatgtagtcaataacgagtatgcccagtatccttttggcgatacgtattactctacttcccgcccgaaggctttcaatgaaaatcttaaatgggaaaaaacgaccacatggaatgccggcctggacttcggattcctgaatggaagaatcacaggcggtatcgacggatacttccgtaaaacggatgacctgctgaacagcgttaagatccccgtaggaactaacttcaatgcccagatgacacagaatatcggttcactggaaaactacggtatggaattttccatcaacgccaaaccgattgtgactaaggacttcacctgggacctcagctataacattacatggaaccacaatgaaatcaccaagttgacaggtggcgacgacagcgattattacgtagaagcaggcgataagatttccagaggtaacaataccaaggtacaggcgcataaagtaggttacgcagccaactctttctacgtttaccagcaggtatacgacgaaaatggcaaacctattgaaaatatgtttgttgaccgtaacggaaacggaacaatagacagcggagacaaatatatctacaaaaaaccggcaggcgatgttttgatgggactgacctccaaaatgcagtataagaactttgacttcagcttctccttacgtgccagtctgaacaactacgtgtactatgacttcctgagcaacaaagccaacgtcagcacttcgggactgttctccaataatgcatatagcaacaccagtgccgaagccgtcgcactcggtttcagcggacaaggtgattactatatgagcgactattttatacataatgcatcattcttacgttgtgataacatcacgttaggttattctttccagaatctgtggaagactcaaacctacaaaggtgttggcgggcgtgtatatgctacagtacagaatccgttcattatcagtaaatacaaaggccttgatccggaagtaaaaagcggtatcgacgccaatccatatcccagagctatgactttcttattaggtttaagtctgcaattctaacattcattaaatcaatttatcatgaaaacaaaatatatcaaacagctattttcagccgcactgatcgcagttctctcttcgggagtaacttcatgtatcaacgatctggatattagtcccatcgaccctcagacaggaggtagtttcgaccagcagggagtatttgtgaaaggatatgccatgttgggtgtaaccggacaaaagggtatcgacggctctcctgacctcgacggacaggacgaaggcgaatccggtttctatcgtaccactttcaactgcaacgaactgcctaccgacgaatgtctttgggcatggcaggagaatcaggacatcccccagcttacaagcattagctggagtccttccagccagcgcacagagtgggtttacgtccgtttgggatatgacatcacacaatataacttcttcctcgaccagaccgaaggcatgacagatgcagaaacactgcgtcaacgtgcggaaatacgtttcctgcgtgccctccattattggtacttcctcgacttgtttggtaaagctccgttcaaggaacactttagcaatgacttgcctgtcgagaagaaggggacggaactctatacctacattcagaatgaactgaacgaaattgaagctgatatgtatgagcctcgccaggctcccttcggacgtgcagacaaagccgccaactggttgctccgcgcacgtttgtacctgaacgcaggcgtatacaccggacaaaccgattatgcaaaagcggaagaatatgccagcaaagtgattggctcagcatataagctatgtacaaattacagcgaactgtttatggccgataacgacgagaatgaaaatgccatgcaggaaatcattctgcctatccgtcaggatggagtgaagacacgtaactatggcggttcaacttatctggtttgtggtactcgtgtagccggtatgccccgtatgggaacaacgaacggttggtcctgtatctttgcccgtgcagcaatggtacaaaagttcttctccaatctcgaagatgtgccgatgctgcccgccgatgttgaaattccgaccaaaggcttagatacagatgagcagatcgatgctttcgatgcagaacacggcatcagaacagaagacatgatcaaagctgccggtgacgaccgtgccttgctatactctggtgtaggaggcggcagacgcaaaattcagacagatgcgatcagcggattcaccgatggcttgtcgattgtaaaatggcaaaattaccgctctgacggaaaacccgtcagccatgctacttatcctgacacagatattcctttgttccgtttggcagaagcatacctgacacgtgcggaagccattttccgtcagggaggagacgccacaggagacatcaatgaacttcgcaaacgcgccaactgtacaagaaaggtacagaccgtaaccgaacaggaacttatcgacgaatgggcacgtgaattctatctggaaggtcgccgtcgttcagacttggttcgtttcggtatgttcacaaccaataaatatctttgggactggaaaggtggagcaatgaacggaacatctgtcgcttcatactacaacaaatatcctatccctgtatcggatataaacaataacaggaatatgtcacaaaatgaaggctataaataaccaagagttcatccttatataaaagaatgccattatgaaaaaaatatccaacatattactcgctgtcaccttcgcactgcctctatttacagcctgcgaaacagacaatgacagcaatccgatcctgaacgaacccgatacattcacgctcaatacgcccgcgtatgcagccaacaatgtatatgacctgaagaatgcccaaactgtagaactcacttgttcgcaaccggactacggttttccggcagctaccacctacacggtacaagcctcatttgaacaggatttcatagaagcgacagatgagagcaaagccaactatacagtgttggaaagcacctccccgacagcaaagatcaatgtggatgcttccgaactcaacaatgcgcttctcgacttgtggacggccgtgaacggagagcaggcagaactccctaccgaaccggtagctgtatatatccgcctgaaggccaacatcacaagcagtggaaaaggagtatgtttttccaatgtgattgagttacccaacgttctgatttccaagagcaccagctcattgacacctcccaagacaatgttcattgtaggttctatgctggataccgactggaaagtatggaaaccgatggcaggtgtctacggtatggacggtcagttctattcaatgatttacttcgatgccaactccgagttcaagttcggaacaaaggaaaacgagtatatcggtattaacgacaaccgcgtgacggttaccgacaaagccggagcaggagtcagcggcagtgacaacttcgtcgtagaaaacgccggatggtatctcttctacgtcaaagcggctgtcaaaggggatgattatcagtttaccattactttctacccagctgaagtgtatttgttcggtaacacaaccggcggttcatgggcattcaacgacgaatggaagtttacggttcccgccaccaaagacggtaacttcgtatctcctgccatgactgcaagcggagaagtccgtatgtgcttcaagacagacctcgactggtggagaactgagtttacactccatgacggtgaaatcttctatcgtgatttcaaccttattgacagttggacagaaaagggagacggttattccgtacaaggttcagccggcaatgtgatccatctgaacttcacggcaggtacaggagaaaagaagtaattaactttaaaaagaacgattcatcatgaaaaaacatttaatatacatagggatgtttctggcagcaatcgggttttctgcctgtaacgaagatttcaaggactgggctgatccccagtccaatccccaggaagagtcagcgggacagttgactgcaactttcacagcaggcaaagacgccagcatcgtcatggatgcggccacagccgattccgtagatattgcaaagttaagctcgaccacagccgaagaaggcagtaagatcgctgtcaactctttgacactgaatgagaatcacaccattccattttccatgacggaagatcatgtctttaaagtagccttggcacaactggacagtgtgacgcaggaagcctacaaaagccgtgcaagcgtggtacgtgaattgaaaatctctattaatgcttctgccgtaactccttccggtgaaggtattcaactggtgggaaatgaagtaagcatcaccttgcagcctgccacaactccggctgttgatcccgacggctattatatagtcggtgatttcacaggctgggacggcaacagtgcccaacagatgaagaaggacgctctcgatgaaaacctgtatatactggaagcagaaatagaaagtacttcgaacttcaagattttcccggcttcagctattaacggaaacgacatagactggaccaaagccttgggaagtagtgtggacggtgatgactccggtgataattttgttagctggacaaatgcgggagccattaatacagcactggacggtaagatcaaaatctcgttcgatgccttcaactaccgttttacagtgaaagacaacagtgcgcccaccgaactttatatgaccggcagcgcatacaactggggaactcctgccggtgatccgaatgcttggaaagcacttgttccggtcaacggaacgaaaggaactttctggggaatcttctatttcgctgctaacgatcaggtgaagtttgcaccgcaagccaactggggcaatgacttcggctttgtagatgctatctcacaggaatccaaagaccttgccggattgtcggacgagggcggcaacataaaagtcggtatagccggctggtacttagtatatgtctccgttatcggcgatgacaaagcgatagaatttgaaaagccgaatgtatatctgatgggcgatacctcatacaacggttgggacgcacaactggtagaacaggacttatttaccgtgcccggaacggctgatggtgaatttgtttctccggcattcctgaaagatggcgcagtacgaatctgcgtaaatccgaaagctgtctctgccggcgactggtggaaaacagaatttatcatcttcgacggacaaatagcttaccggggcaacggtggtgaccaagctgcggtacaaggtaaaaccggacaaaaggtttatctgaacttcggcaacggaacaggccgtatcgaataatactacaagaaatcagagaaacagggaatggccgtcgcgaatacaataaaatcggggcggccactgttttttaagagactacatttattgtctttaatacatcatcattatgaataaacatctccacttattatctcttttgtggttgtcaatgctcatggcattcatgaccgcttgcagcgatgacaaaaatatcaccgagcctgctccggaacccgaaccgcccatcgaagggcaatggaccgcacttaccgcctctcccgacacatgggacgagaccaaacgggcagatatctcctaccagttactggtctattccttcgccgacagcgacggagacggatatggagacctgaatggcgtcacccaaaagctggactatctcaaccaactaggcgtgaaagccctctggctctctcccatccacccctgtatgtcttatcacggatatgacgtcacagactacaccaaagtcaatccgcagctcggcacagaaagcgacttcgaccgtctggttacagaagcccacaaccgaggcatcaagatttatctggactacgtaatgaaccacaccggcactgcccacccgtggttcaccgaagctagttcatcatccgaaagcccgtatcgcaattattattctttctctgaagacccgaaaacagatatcgcagcaggcaaaatcgccatgatcacccaagaaggagcagccggatacaatgccgcagaatggtttcaggtttctgacgagaccgctgccgtgaaaggactgctgaaatttacactggactggagcaacgcatcttcccccatccttgtcgtttccacaggcaccaaagcagacgaggataatccagacacaggtaccgacaacgccaaatacttatactacggagaagacatctgtaaaaagttttatgacaaaggaaacaacatctatgaactcaccgtcgactttgagtccacttgggggcttctgatccgtaccagcaatgcttcttcctggccatctggaacaaaatacggcgcctcttcctcgtcggagaaactcgcgctgaacaaggatttcaaactgaccaacgccggcaaccctgccaacatcatgttcgacagccagcagatcacctatttccattctcatttctgcaccgactggtttgccgaccttaactacggccctgtagaccaggcaggcgaatcaccggcatatcaggcaatagcagacgccgccaaaggatggatcgcccgtggtgtggacggcctccgcctcgacgccgtgaagcacatctaccacagtgagaccagcgaagaaaatcctcgtttcctgaaaatgttctatgaagatatgaacgcctattacaaacaaaaaggacatacggacgacttctatatggtaggcgaagtgttatcggaatacgataaagtagctccttattataaaggtctgcccgccctttttgaattttccttctggtatcgtctggaatggggaatcaataatagtaccggatgttattttgccaaagacatcctttcttaccaacagaaatacgccaactatcgaagcgattacatcgaagcaacgaaactgagtaaccatgacgaagaccgtacatcgtccaagttgggtaaatccgccgacaaatgcaaactggccgccgccgtcttactcacttccgccggacatccttacatctattacggtgaagaactgggactttacggaacaaaggataacggagacgaatatgtgcgcagcccgatgctatggggagatagctacactaccaactacacagacaagacggatgccaccgtttcgaaaaatgtgaaaacggtagcggaccaacaagccgatacccattcacttctgaacatatatttctccctcacccgattgcgcaacacctatccggcactggcagaaggaaatatgaccaaacattccgtctacaacgaatcacaggagaaagactataagccgattgccgcctggtatatgaccaaggacaacgagaaactgcttgtcatccataatttcggcggaacggccatgcaacttccgctgacagacaagattgagaaagtattgtttgtgaatggcgaaactcaacaaaatacagacagcgacagttacaccttgaaactgggaggatacgcctctgtagtattcaagttgggcaactaaatacatcaagaccacgtcttcagatttattctattcttatgaaatgaatctgaagacgtggtcttgactttttccggtttctatctatcttcaagaaaccttatatcaatcggaatttccactttttaatggaataagaatcaaacttgtgtttctccttctatatactcttccaaaaatagattctccccatcgaataccgcataggagaaatagttaatccagtctccaagaatcagcacacgggaagtagcactcaacattaaatccagttcaatgtgacgatggccataaatgaagaagttgatattaggatgactcttcagatattcttttgtataaagtaccagatgttccttattctcccccatgtaatccggttctttgccgtccacccgcttttcgcggctatgttttgcccacgtcaagcccaattccacactccaacggggatggatggcagaaaacagtgtctgaagtgttgtactgtgaaacatccagcgcagcaacttaaacttcttgtccgggtcacccagtccgtcaccgtgagccagataaaactcttttccgtatatttcggtagtcaatgcttcacgatgaataatcactccgcattctttagaaagataatccccacaccagatatcatggttgccggtaaagaaatgtacctccactcccatatccgtgagttcggaaagctttcctaaaaagcgggtgtatcctttgggaaccactaaccggaattcataccaaaaatcgaacatatctcccaacaggtaaacggcagaagctttatgcttgatactgtcgaggaagttcaccaagcgccgttcctgtgtacgtccatgttctatggcacgggaaccaagatgcgcatcggaaaggaaataaacgttcttcatgagttttgagtttagagttatcagttttatattttgagctatgaatttacaggaatccgagttccagttttgcttcctcactcatcatatctttatcccattccggttcgaacacaaggttgatagtggcggttgtcactccttccaccgattctactttctggcggatatcttccatgatgaaatcggctgccggacagttgggagcagtcagagtcatatcaagcactgcttccccattgtcggagacgtctattttataaatcagtccaagatcgtatacattcaccggaatctcaggatcgtacaccgtctttagcatggctacgatcttttcttctattttaaatttttccatagggctttccttattaatatgtattgcaaagataagaataaatttattcagagcagcccttcgtcggcaaaactgtaaaacttatcctcacaaacaataacgtggtctatcaggcgaatgttcattgtgtcggctgcccggcggatgtgttccgtcagcgtccggtccggttggctgggttggatatttcccgaaggatggttatgtactacggctatttgcgtggctctctgcagcaatgcttcccgaagaatggtacgtacatccgtatacgttccgtctattccgccggtgctgatacgtaccttatcgatcagtctcgtcgcctgattcaataataatacccagaattcttcctgttcaaggtcgcacatgacaggctggaagatgtcataaatatctcttgaacaagagatgcgggggcgttcttggatattttgcagtttccgtcgcttgccgagttccagggcagccattacagtgatgctctttgccggtcccattcctttaaaacgggaatagtcgcagacttcccactttgccaaggagttcagattgttatcacaagagagaagcaaacgcctcatcagttcgacagcactttcttccgtatttccggagccgattaatatggcgagtagttcggcatcactcaatgcggctgctcctttctccatcatcttctcccggggacggtcttccagcgcccactggttgatggatagtttgtgtttgctttccatgatcaaatcacttacttataaaaattcttttgaaacgcctcgaattcgtcctttcctcttatacaacgctgccaccatgcacgccagaatcccgttccataaccaattagttgtataaaggaagcagtaattgacagcattccaatccataaactgcgatttctgattgtcgaatccacgcaaaccaccaaggaatagagcagtaagggaagaggtgctgccaacatggcggcaaatcctaaaaacagaagtgccatctcgcctgtcgcacacccgggaaccgttttggaatatagtagataaaaagctaacaaaacgagccccaaccccaaaagagtcagtaataaaagcaaagagactcccagcgtgaacactgccggtagcaaatgcaccaatttcaacgaatcgggatatttcttataaaggttaatgcgggcaatgccggagttatggacttgcttaaagaacttcttcaagtctgtccgacgtttgtgatatacccatgcgtcagggaaaagacgacaagtatagccacctttaaaaatacggatactgaagtcgatatcttccccgaagcgcattttagagaatccccccaaagcttcatacacttcgcgacgaatccccatattgaagctacgaggataaaacttgtccatcttcttttttccgccacggataccgcctgttgtaaaaaaggaagtcatcgagtagttgatagctttctgaatatccgtaaaagaatcgtgcgcacggtcgggaccaccgaacgcgtcggcaggagaagcctgaagctccttctctatcgcgtcaaaatatccttcgggcaaaatgacatcagagtccagtatgataaaatattctccttcgcttcgctccgctccgtagttacgggtctgccccggtccggaattgggtttagagaaatacttgatgtccaaccgatctgtataccgatctgccacttccttacaagggatggatgaaccatcttcaacaataactacttcaaaatctttaaaacactgtacagtgagactttgcagcaattcatccacctcatcgggacgattgtaaacgggaattatgacagaatagcgcatatcaatgaatttataaaataacgattttgcgtaaatccaataaaacgaatattgatttgaagcacaaagtaaggtaaaaaaaacgagacttataaaagagttaacaaaaaaaggcgacttcatgataagccgccttttttttattatctcagttcttcttactttttcagaatatccattgtatccgatgcaatcaacaactcttcatctgtcggaatcactactactttcactttagaatctgcagtagaaataatagcttcctcaccacgaacttttgcattcacattattgtccagtttaatacccatgaattccatgtctttacaaacagattcacggcattcaaactgattttcgcctacaccacctgtaaacaggatgatatctacaccgcccaatgccgcagcataagcaccgatatatttcttaatacggtagtagtacatcttttcagcaaggatggctctttcgtttccgttagcacaagcggccagcagttcgcgcatatcgcttgatacgccggaaatacccagtacgccgctcttcttgttcagcaggttagaaatgcctgtcgtattcaagccttctttttccatgatgaatgttactgcaccggcatcaatgtcaccgctacgggtacccatcatcaaaccttccaacggagtcagtcccatggtagtatctatacatttgccatccttgatagcagcgatagaaccaccgttaccaatatggcaagtgatgattttttgtcctaccggattaacgccaaggaactcacatacacgttttgaaacataacggtgagaagttccgtggaagccataacgacgtacgccatatttctcatacatttcgtagggaatagcatacatataagcataatccggcatcgtctgatggaaagctgtatcaaatacgcctacctgcggaatgttgggaagaatagcggacactgcattcacacctttcaagttggcaggattgtgaagcggagccaggtcgttgcaggcagcaaaagcttcgagtacttctttgttcagcaatacagattcactgaaacgttcgcctccgtgtaccatacggtgacctaccgcattgatttcgtccagtgatttgatagctccgtattccgggctaatcaatgtattcagaatgaactccacaccaatcgtatgttccggaatgtctttttcgagtactttcttttcgccattcggcaaagtcaatttaaggaaagagcctttcagaccgattttttcgataccaccttgtgcaatcacttctttggtggtcatatcgaacaatttatatttgatggatgaacttccacagttcaatactagaattttcatattgtctttaatacttaaaacttgatacttatttattgttttttgctgcaatagcctgattagccgtaatagcaatcatgcgatatacatcttcgatagagcaaccacgagacaagtcattcaccggacgggcgataccctgaaggatcgggccgatagcgtcggcatgtcccagacgttgtaccagtttataagaaatatttcctacttccagactcggaacgatcagcacgttagcctctcccgctacgggtgaacccggagctttgcttgcgcctacttcaggaacaagagcagcatcagcctgcatttctccgtccagatcaagtgtaggagccatttccttagcgatcttggtagcttccactactttatccactacttcatgtttagcggaacctttggtagaaaagctcagcatagccactttcggattttcaataccggcaacggctttggcagtctgtgccgtacaaacagcaatctgtgccagttggttagggtccggaaccggagttacggcaacgtcacccatcaccagaataccattcttaccatactcgggagcatgagtcaagagtaacatagcaccggatacacaagtgatgcccggagcagtcttgataatctgtaaagccggacgcagtacattgcctgttgtgttgcgggcacctgccaactgaccgtcagcatcaccgctcttaatcattaaacaaccataaaacaaaggatcattcgtcaattgacgggcttcttcaatagtcatgcctttcttcttgcgaagttcgcacagcaattgtgcatactcttcgtgtttcggagaagtttcaggatcaataatagtagctttgctgatgttacccagtccccatttcactgcaagttcgttaatttcagcgggtttacccagtaaaataaggtcagcaacttcatctgtcaaaatctgattggcagcttttaatgtgcgttcttcagttccttccggaagaacaatacgttggcggtctgctttcgcacgagccacgatttggttgattaaattaagcatagatatatttgaataatattataaaccttgttacgatttgtaatttgcgctgcaaaagtactcaattttgcaatatccacattacaattccggctaattttattctccaagtctaaaatattataatatttaacactgtacttctattttttctacctttgcagtgttttcaaacaaatcaataggtaattagtgtatgatacgtcagtgcgccattttatttggctgtttggctttgggtgaattaatcgtttatttaacagggatcaagctcccctccagcattatcggtatgctgctgctcaccctttttttgaaattaggctggatcaaactgcagtgggtgcagggattgtccgactttctagtagctaatctgggcttctttttcgtacctcccggagtagcattgatgttgtatttcgacgttattgcggcagaattctggcctatcgtcatcgcaacaatcgttagcacggctctcgtgctggtcgtaacgggatgggtacaccagattgtccgtaaattcagactggcacgtcagattaaactggcgagtagcctacgcttatcagactttcacttgtccgacaagctacatttaaaaaacaaaactaacttaatggataaagacaaatgagctttttagaaaataatttctttctgctggctgtcactttcggcgttttcttctttgccaaattgcttcagaagaaaacggggctggtactgctgaacccgatcttactcaccattgccgttctgattatcttccttaaaatggccaatatctcttacgagacttacaatcagggagggcatctcatcgaattctggttacgcccggctgtggtagctttgggagtccctttatatcttcagctggaaatgattaagaaacagttgctgcctatcctcttgtctcaactggcagggtgcatcgtcggagtgatctctgtggtattaatcgccaagtttatgggagcttcacaagaagtcattctttcattggcacctaaatccgtaacgactccgattgccatggaagtgaccaaggctatcggaggtatcccgtcactgacggcagccgttgtagtagcggtaggtttactgggagccatctgcggatttaagacaatgaaaatcatgcacgtaggcagtccgatagcccaagggctttcgatgggaacagccgcccacgctgtcggcacttccactgccatggacatcagcagcaaatacggggcgtatgccagcctgggattgacactgaatggaatattcaccgcattactgacaccgactatcctgcgattattaggtgttttgtaaaaacaaaattctttcattttccgttatataaagagttaaacgcaaaaagcattttatgattccatttaaagacattacactagctgatagagacacaataactgcattcaccatgaaaagtgaccgccgaaactgcgatctttcattttccaacctctgtagctggagattcttgtacgatactcaatttgcagtcatcgacgattttctggtattcaaattttgggccggcgaacaactggcatatatgatgcctgtaggaaacggcgatctgaaagctgtattacggaaattaatcgaagatgcggataaggagaagcataatttctgtatgttgggagtttgcagcaatatgcgcgccgacctcgaagcgattttacccgaacggttcattttcacggaagaccgtgcctatgccgactatatatatttaaggagtgatctggctaccttaaaaggaaagaaatttcaggcaaagagaaatcatatcaaccggttccgtaatacgtatcccgattacgaatatacaccgattacgcccgaccgtattcaagaatgtctggacctggaagccgaatggtgcaaagtgaacaactgcgaccagcaggaaggaacgggaaatgaacgtcgtgccctcatttatgcattacataatttcgaagcactcggtctgaccggaggcattctccacgtcaacgggaaaattgtggcatttactttcgggatgcctatcaaccatgaaacattcggggtacatgtagaaaaggcagataccagcattgacggtgcttacgccatgattaattacgagtttgccaatcgcattcccgaacagtatatctatatcaaccgggaagaagatttaggtattgaaggcttacgcaaagcaaagctgtcttatcaaccggtaactattctcgaaaagtatatggcttgtctgaaagaccatcctatggatatggtcagatggtaataatatataaggtatgacgacaaaagaaaaggttaaggcattatggcagttatgtttcgacgacaatgaagagttcgttgaaatgtacttcaggctgcgctataaaaatgaaataaacattgctatcgaaagtggggatgagattgtttccgctcttcagatgattccttatccgatgactttctgcggagataccgtacagacctcttacatttcaggagcctgcactcatccggattttcgcggaaacggagtgatgcgcgaattactctcccaagcctttgcaaagatgcttcgtaacggaatgtatttcagtacattgattcctgccgaaccttggttattcgactattacacccggatgggatatgcttccgtattccaatattcggttaaagagattaccgtaccggaatttattccgtctaaagaaataacagtcacctctgaagtcggatgtcagaaagaagtttacgaatatctaaacagcaaactttccggacgcacttgctgcatccagcactcctttgaggattttcaagtagtcatggcggaccttatcctcagtgacggaattttggttactgccagatcagagaatcaaatcaatggattggctattgtatacagaagagataagcaattaattatcagcgagctttttgcagaaaccaaagatgccgagcacagtttgttgcaccatatcaagcaatttactggatgcaggtacatgactcagttgcttcctccggagaaagaacagacgcaatatccgttggggatggcgcgaatcatcaatgccaaagaagtgctgcaactgtatgcctccgcttttcctgaggacgaaatgcaactggaagtatcagataaacaattgtcagtaaataatggctattactatctgtgtaatggcaaatgtatgtatagcaccgagcgtttgcccggcgcacatataccaatgaatatcagtgagctgacaggaagaatatttcaggcactacaaccttatatgagtttaatgctgaataagtgattccagataacgtaccctttcacaagctgccagcaggaaagcaccgactccgaagtttgaagtagaattagcatctacgacttgccccggtatggctttctcgccgatgggttgcacataaccgatctttccgtcgggctgtaaagcaactgttgacaaatatttccatgccttctcaactacaggttgataatgggcggagtcaaggaaaccgttattgatcccccattgcagaccgtacgtaaagaatgccgtaccacttgtttcgggtcccggtgcatgctgcgcatcgagcatactacgcgtccaatacccttcaggttgctgacaggccgcaacagattttgccaatgtacggaaacggtctatatattcctgacgatacttatctgtttccggaaggtctttcaagactttcgccagccccgccagtacccagccatcaccacgtgcccagaaatcctttttaccattcacacttttgtgcttggggtatacgtattttccatcgcgatagtaaagtccggcttcttcatcatacatgatactgtctgcataagcgaggtattcatgcagtttctccaggtaaagtggatttttagtgatattatatagtttggtcatcacaggcattaccatatataaaccatccgcccaccaccaataatcattgttgggtatactcatctgatactccatcacctcacgggcacgggctatcttatgtgtatccggttccagattatataaatcggcatacgtctgaaaacagatctgataatcgccgaacagtacataatcattgctttcgccataactgtacttccagttggctttatgatccgatttagcgcctttccactcattatgttccgcccatccttttgagtattccaagtattccggtttgttggtcaggaagtaagcctccatgtttccggtatgataagcggcattgtcccagaaagaacgcccgtgttccggatggtttgtctgccagtagccattgactttatgaataatgtcaaccacttctgccgaagatgaaactttcttggttgtgcaaccggcacacaccgcacagcctaccaccagtgcggaaaaaagagttgcatacaatttcttcatatctttattttttggtattcgtattcgcttccagtacatatatcatttgaggttcaatctccgccgtgcgttcaccgtcgccttgacaagtgtgctgtacaaagagattgagtttccgctgcttcttccacaattccgtgtcatgggacggttcccaggcatctacggaaaaatccgtcaggtcggtgactatccacttaccattggcaacatcagcagtatgcgccattgagacacggctgccccgctcttcgtcacggaaaatatagaagatttctccatcctctaccacaatacgcggacgggcaacaggaatcatcttagtgcctcctcccttcagtgtaaacggagtcttgcggtctgtcacctgacgattatgccatgtcttcccgtcattccagacaatgcgatattgagggacttcactgtccgaactcctccaataagtggcaatataaggattgccaccagcgtctgcactcatacttgtctggtttatcaattccgagttttgtggaatacgacaagcatactctgcattcgaagctgtaatcggaagtttatattgttcaccatccgacttataccaagtcactccgttatcaaaagaacgcgcgtagcaaagatcatggttggtctccacctgccaggtttcacgccatacccatgagagatgaatcgtacctttctcgtctacatatagctgccagtaagcatttcgtttgtcttcaccatcaatcaggacatcctgtacacgggcccatttatggtctttcaatgaataacggttcatcaccagatttccacgtccggaagaaccggaacggtagacaaacaacaaatccccgtctgtcagagggtaaaattccggataagtaacatttccttcgtccactccggtcatcggcattttatcgcccagttccaaagaaccgggggcgatactgcggcagtaattcaacttatgtccatggtggtcaaaagaaacgtgcagatacccttctccgtccaccattatactgatgatattgtgggcatcttttacatttccacgatattgagtacgatgcaatgtccattgcttcgaatttagtttccgtttgcccaacacaagatagccatcggcatcataatagctgatatattgctcatccccatgcgttaccaatgaattattgcggaatatcgttgtattgacagatgtacaactatatcctttggcaacttccaccagtttttgcgaaaagcacaaggcagaaacagatagtaataaaaaagtaagcagcagtgtccgtttcatgatctattttttctgtttgtcagatttcttgtatttgtcagatttcttctgtttgtcaaagacggtcaaatcccacttttcatgccatgggatggtaatagctccgtcttttatcaatacaggaagccatacatagcgtgaatcttcgaggtctttctttttccagcggtcaaacatggcaatatatgcattcttctttccgataaccggttgtacgtatgtactctgcgcatagaaagtcttgtctgcatccggacccgtacaaggattacctatcgttttccatgtacccatgatggaatccgccactgcgatttccgccacattcgggtcccagccggtgcagccggaacttagcatataatatttgcctttatgcttaaacaccgccggagcttcacgggattctttgatgaaattgcgtgtaaagcgtccgcttggtttcaggtaatcgtctgtcaggagactgatatacatggtttcgttattttctgaagaatagaattggtaggcacgtccgtcatcatcgacaaaaactgtctggtcacggctcatcgcattattcggccggaaacttcccaagtaagtgaatagtccgtttggaaaatcagagacagctacacccgcacacgctttgctgtaatcggcactctctacatgtgcccacatcacgaacttacctgtctttttattataaatcactttcggacgttccaaaaccttcgacggatgcaggtcatggttcgggtcctctttgactgccggaagcacaatgccctcaaacttccagttcagtaaatctttggaagaatagcagcctactcccgtcacatctgtacgataacactcccatgtagcccaatcaggcaaaatcgttttgccctttttatattctccataccagtagtaagtaccgtcgtggtaaagaagtcccccgccatgcgcattgatagggttaccgtccgtatccttccacacttccccgggaataatataactattcttctgagctcgcatttgtattggcagtaaccctatacaaaccactaccagtaataacattcttaccatatatatttcattatttttgatgtttctcattattctctgccgacatatcacctcgcagtgaaatcattcgctcacaaagataacctataccataaagaaaagagttcaaatatccgtcaaaaaagggatataaaaagaccattcttcgcaaaatgtataatcttccggaattttcccctttctcatagagaatatttattgctgaaagcaataaatatgaaaagtatatccgccggcttctatatatacgatattaatcaaaattccacctatccatccattttataaaggggactcctttatcatcaaactgaacaggcagccagatgtagcgtgaatccgccaggctcttcggacgccacatatccgccataaagaaaaattgccctttctccggcaaaggcaatatataagtactttgtcctccaaatgtcttatccgcatcttcaccaacacaagggttcggcagttgcttccattcgcccaacatagaatcagcggttagcaaacgggctttattaggatcccatcccgtgcagccggaagttatcatccaataagttccctctttcttgaatatagcaggagcctcattgtgtccaccagggaaaatacggatatattttcctgtatgactgagataatcatcggccagttctgcaatctgcaatgtcaggttatcttctgaggaatagatatgataagcctttccgtcatcgtccacaaataaagtcatatcacgggacatttgtccgtctttcagatcacgctttacgaacataccttttgcaatagcttcataccacttcggtgtccaccattccttatactcttccggattccacttcattttccgttcttttcgggtcatgttcaaggggtaagctcccggattgaccctgccggagcgaatgaaacgatagggaccggcaggagaatcactcactgcaacggctgcacgcgcaggtccataaccttgtcctttcagttctaaatgaagccacatgacaaatttcccggttttcgcattatagatcaccttggggcgttccatgatgcatcctttctcaatgtcatgcccttcttcctcagagacagctaaggcaataccttcagatttccagttatacaggtctgttgatgaatagcagttgattcccttctctgtgacaaaaccggatgcaggacggtgttctccaaaccaataatattttccttcatggaaaagtattccgccaccgtgcgcattgattacattgccatccgtatctctccagacctttccggaagcgattcccttttctttctgatagactcttacataatctatttcatacttcatcggcagggcggcctcatcaatcgggccaccgttaattccgccaatggcgagatttagtaacaggtattgtggttttgtaaaaggattggtacctttaccgatacttccattccttgtgctgctcagaggaatttcattcagcagttcatcgtccaaatatagtttgatagcctcttcatcccagtccatgcgccagatatggaacttagatgcccaatcgggatctttgtcagtgaaatgcgaataaggagtagcctgactgtcccattttgcatgccattgacggtctgttccccaagcagcattggctaagatatgtggtgttcctttaatctgataatattccatgatatctatctcaccacatgaaggccattccatattacttcccaatgtccagatagcaggccatgctccttttgccacaggaatacgagcctttatctcaaaacgcccatacagaaactctttctttccggcagtagttactgaagaagaggtatagtcaataaattctctcttcttccgccaatcattacttccggatacataaagaggatttttacggttctgctctttccgggcttctattatcaacagcccattcttgcaaactgcattgtcggattggtaccattgagcttcttcattacgcgcatatccttgctcaaagttccatacagaagagttcaaaggaccatctgcattaaattcatcactccaaacaagttgccagtcgtcctgggcaaatatgcatagtgaaaatgacaagcccatcattaaatttacaatcttctttatcttcatactaatttgtttttctttggtatatccaaacctattgaactatttatccctaataaataaaatgattcatatttacatcagcaaaaataagacttcaataaaaaataaaggactagaaatcgtgcaattaggtcgaactttagatcatattcattgaaatgactcaataatgagcatctttgcacgattttataccgaatagaacacatctgaagtcatataatcaaacgcaggagacaagttcaatcatctcatcccctgcatttactacctatataaaaaatacctatcgattacttcgtcattgtacccctcaagcgatacctctttccaccggactcgtaatcgtaacaaaatgtaaatgtgccatcctcaaaactaacggttccgttagaaaccggaagattcttccagccagccactgtaaaagtaccgtccggttggcgtgtaaacgtcacaccgttgttatcaattgagttgaaatagtcttcagttgttatgtttcccgttggtgaaagatctgaattctgcgtaacattaaagaaacgagcctgatctttattcactgccttcaacgtacgctgcatattaacggaagaaggagtcagttcttcatcattgtcagtcaacgtatatctgatggctaccatctgataagtccctgaaaagtcattcgttaaattgagattcattatgagaactgtatccttaggctgtttcacgtaatcggatactgactcaattttgaaagtcaacgcataaagtttatcacaatccaatccggaagtttcgacagtaaatggcaaccgactatatacatcgcccgctttaatggtcgtgctcattgacggaaaactgcaaaattgatcacccaacttctgatattttaatggggcatccaacatatacttattattgtaccattcgatggtagcgtcattgtgagtcaagacgacttccacattccggtcgatattctggctacctcccgtagcaatggcaacatacgcattttgcggaccatcgccatacgccacatcaaattgctgtaccacttcataggcacctacaatataaacttgtttgtagtattgttcaccatccaaagggctctctttactacaggatgcaaataatcctgcaagtagccccaacgtataaatagttctaattagtttcatatttcttttgattatataggtttatctccattccggattttgcacgaggttcttgtttttatccaacacactcttaggtataggatagaaatagtgtttgtacgagaatgaacgccgtgtcaatttatcgttcaaaatagttgttgtgtagaatttctgacgttcattgcttcttgctttgacgttgcaaccggagataggacgattgtatgcctccatagcatctccccaacggcgcaagtcgtgataacgacgtccttcgcaagcaaactctattctgcgttcatgcttaatcagttcacggaccttattcctgtcggcagcaacagcctcagtaattccgggcagaccggcacgatgacgaatcagattgaaatacttcacaatatcagctgtattatgttccaccgtcacttgactgccgttaggcatctccatcgtataaggttctttcaactcattaatagcctccacataattcagcaatgtttccgcataccggaaaaccgggaaatatttagctttgaccgtaccctttttcatctcatcttccaaatgtctatatttgacacaagtatagcctgtacgattataatcttcaggatgatccggattagcggaagcatatccgtcggaataataagtaacctcaatattcttgtactgattctccgaagaagaagtgcctggccagaatgaatggcaaaagcctatcgttgcataaaaacgaggttcgcgattgttatacattctagcagtgctcgctagaagtgtaaagccagagaaagtttggttggcgccgccaattctttcaaaattaacgctggcatccggataaggatagtcctgactggattcattgatatcttgtccgtccaccatttggtaagcatcaatcaagtcttgtacgagattcaagccaccccatccacctaatttgaaaggtgcagcagccaccaatggggcatcacctgtcggcatttgacaggaatagataaattcaggattaatcatcacaggaatttcaccactgaatgtataagtcaacgaacggtaatggtcgataccggctgctccctttggataaggctcataataatccggatctatctctttgataaattcttcattagtgggcagatccttgctatctatttctttgggagtccaatacaactcaaatttatttgaatcaataatgtattttgaataagcggcagacactccccatttcgaattatcattttcctgcgaaataaagtttgcgccgtcacttgtccgctgccagtcagcataaaacttattgccgttataccacggactggctgcatacaatgtaattctcgacaaagtagcgtaagcggcccattgagtaggaagcgtcacaaccgttgaactttctacttccagtggcaagaactgaatggccagagacatccatttacggatttccaatacgcattcatcgtatgttcctcgttccagtgacatttcggctaccggcacatccacattaaagggcgtttccggaacaatgggcacaggtccgtactgcaacatcagcagataataataatatcctaccaaaaagtagcatcgtcccatcaactcacgacgttcaacgtctgtcacatcgggtacttcattgattctcgacaaggcagtgagtgccatacgaataccctggtaatatttgggatagttattgtaatatccgtcataaggagtaatctcgtccagcaaaaacttcatgccgtagtgctggctatcattccaggacatgaaattctcatcagaagcaatttggaacggtgtagaagaatttgaccaaagtttgccttcattgggtatatattgcgctgcaccgttaatatactgatccaggagttctttgcgagagaatacagagtcaagaaaagtcatctggtcaatatattcttcgacatccagataatcaccgcaagattgcagcccgatggttatactacaaaccatcgacagaaataaagtctttataatatttgttttctttttcataataatcgtcctttagaaagttaagttcaactgtaaggtgtacatcctttgcaaaggatattccgctccattaccagaggcttgcgatggatcaaaaagcttcactttatcccacacatgtagattctcgcctatcagactgagagtagcagattccacaccgacacgactcttcaaccaattattcgtaaagcggtaagagatatctacatttttgagacgtagatatttaccgtcagctaaccagaaggtagactcctgattattatttttattttctccatacgttagtcgcggaaacttagcattcggattctctgccaatgcaggatcaatgccattagcctcagcatattctcttggaatccaacgatttcttggatcagcaaccatttcgagtaagttgcctcttgattcatttaagaaaggatagaatccccgaccaccttgaaaatattgtactttagagactccttcaaacaaaatactaacacggaatgccttgtagttccaatcaagtgcaaaaccgtattgtataaacggtacagcagagtagttgagaggtacgacgtcatctttatcaatcttaccgtcaccgttcacatccttatacttgatatcgcccggacgataattatccataaaggtctgtttgggactacttttaatgtcatcctcatctttaaataatcccaaagcaattaatccgcgctgtactttgtaagggactccggaattagactgatatggataattcaccccactctgttcccagtagatcacttcgttttcagcgtgagtaaagttaccacgtacagtaagagccatatccttattaaatgtatgagtataagctagtgtaccatccataccccacgacttcatgcttccgatattagcataaggaagtacattgcttaaaccaccctcgtccggtatattggcacgcctctggaaaatatcggttgtcttcgtatgaaagaaatccactgtcatgtctaccttatcatcaaagaaacgggcatcgataccaaagttcgtttttgtactgacttcccattttaaattcattgatccggtacgattttcggcaagtccggttccccatgtactggaaacgttacctaaagtagttaaataagggaatcgaatatcattaccattctcatctttcagacgatcatttcctacccgtccccaagaagcacggaacttcaggaagttattgaatgggagcaggtttctataccaatcatattgcgtaggcacccaccccccggagatagaggggaaccaaccgtagcgacgttctttattgaaattttccgaaccggtatagccaagattaccttctacgagataggtatctttataagaataggtagcgcggaaggaaagtgcctgataacgtttgggaatgctgaccagcacaccgtttccccaatccacattggtcagttcctggcggtaaaaatgcgccaaccccgtcacacggtgatcttgattaaacaaacgtttatagttggcggcagcttcgaaatataattcccgattggatgctgatgcttgtattgctgtcatatcctccttatttacagtacgcacagttttcaagctaccatccaaataacgtccatctttgggatcggcataatattgttcggggttcatgtgtctgtcgactatgtgtgcaccattcatggagaatgagaacaagccacgtactgacaatccctctgtgattatacccaaatcctgcgacaagcctacatttattttggtagaatacgtctcattggtagtatatcccatgtaattcaggcgtacatacggtgatttatcctccagattagtgccataagcaggcaactgaccattagagtacctcactggaaccacagtaggaggtaagttcgcttgcgattcccacaggtatttattgcttgagcctgttcctggtgcgttttgtgtcttgattactgcttccaaattcaaactcaacaaagttgtttttgtaaggtcagcatcaatattcgtacggaaattatatttatgatagtttacattaacgtcatgtttgcttgcagacttatcctgtttaaatagagcttcagagttaaggatacccaaactcatatagtagcgagcactttgtccaccaccggaaatacttaaatggtgttgattgttaattacatgatctttcaaaatcacatcacgccaattcacattcggatataaatccgggtcaagacctgttttgaataattctagttcagtagcagaatataccgggtcgtctccacgaacagagcgcgcttcattcgccaatgttgcatattgataagcatcggcatattccggcatacggggtgaataagaataagtagcattagttttgaaattgacatgcaactttccggcttttcctcgcttcgtagtaactacaactacaccattggcaccgcgagttccataaacggctgttgccgatgcatctttcagaatactaaaactttcgatatcagcaggatcaagatcgttgatatttccttcgattccgtctatcaacaccaatgcactagaactggcgccaaacgtactcataccacgaatccagaactccgagaagttgttaccaggttcgccacttcgggtcacggcaataatgcccggcacgcgtccacccaacatgttactcaccgataccgcaggagcttgaatccctgccgggtctacattggtgatagcgcctactacagaaacctttctctgagtatcacgccccactaccacaacctcatcaaactcattgaccgcctccttcaaagcaatcttctctttcagtttcgtagcagtatatttaatttcccgagtttcataacctatataagaaaatacgagtgtacttccggcaggaacacctgtcatcttaaaccgtccgtcaaaatcggtaacaactcctacaccctgttttccttttatctgaacagacactccgatgagttcctgtccttgctcgtccaagacgatacccgcaacatctattccgccttgggcgaacatagttgctgacatgaatacccaaaatagtactaaaatacttcgtttcatatttatgtttttcttagtgattattctactgcatacttcctaatagcttttccccaggcttcagctatccaatagccaccttcaccatcgtaacaaatatcataaggatagttaaaggtagcttccagcggtgtgccatctatctgacttgctacatctacctgaccagctacagtagatacatagccatcaagaatatccaacttgcgcaagcagtaccccttaaatccatcaacaatataaaagtttccatcttcgtccactgtcattccgttgggttgggcaaacaaagcttcttcccgaagaccatcttgcactgtcttttgggtagccgacccacagaaccattcacattctccatcaggagtaatcttgtaaactgaagacagattctggtcagacatgtagaaattgctatctacaaaataataaataagataagggccaggatttgtgccaagagatcctgagagttccagttgctttattaatgttacctcttgtgtcttcacattgaagcgaccgaaattcttgttagaatcaacaaaatagagccattcttctgtctcatccaatgcaacagcaccaattttaccactaaaagtagaaccaagctgtccgatacgtgtaggtgcccaaccacttgctttcatatagacatatactgtatgagtcccttcccaaccaatactatacactctttgtttgtctttggtaacagcaggctttccacctttaaaacccggatgaacggtagtcaccttgttatcatccaccgaaatcaaacggacacgaggatcatctctttgataagcaagtaccgtattatttcctacggctgcaattccccacatgtacttgaactttgcagatgcaaggtcaccatcatcattcccatcttttgaagccgaaccagagatggtagaaacattctgggcctgttcatacttaaatgtgccatctgtagtcacttccttcccatcaacaattaccttgatacggtttccacccggcaattgtctgggtgcaagacaataaagggtattgttatcgatacctattactgtagataagcgttctgctgcctcgtccacaaaataaactttcacctttgatttgtctgtaccaaagttagaacctttaacgataaccttttcccgtagcttgccctctaccggcataaagctctccactgtaacgggctgattcggatcataagtcgccccagtggttttgttgtcatcgctatctttacagcttcctatcaaaaagagaagtgttagcactaaagaatagaaaatgcaatttttcatagcaaaaatattaatgaattaataaataatgattagtctcaagattacgtccgaacagtatgacatttaagactccatactttgagctagttgttttctttgttaatgtttcatttttcatcatattagtatatatttagaattgtcaattgtttcaccgacttatcagcctagatgtcaacgaatgcaaacatagaccattctaatgtcaacaaagagtaataatcatctttatagggagaattatagtgattaacttattttcctcctttatgaatgataattctccctataaaatgctgtatttaactcttttctatgtggttatgaatctgcgacccaattattacaatcattgcagtcaaatacaataatccctttctctataaaaaataagacctgcgaatgcatgaattaattcgtccgcctatgggcaacgtttcgtccggctataggcaaacgcaatgtcgtctataggcaaacttgcgtccgactataggcagacgaattaatttatgtactgaaagggattatttatagcacaaaccggagctaaatttagcattgaaattctttatccaataaacgacttttagatttatatgatttgaatttatatatgaacggtctggctcatttttacaccaaattgaattatatctcatcctataattttcaataaatgatccgtcgcattaaataaagtactatttttggaaatcatgtctttcaactttgacaggtgatatagaggcattttataagcgaattattaatcatatattcaactttaaattagaaaattatggaaaaacagattttgaatttcgttttcatttcagtatgctcatttctgttattcattagttgcagtagtgaagacagtataaatgattctcattacactcaacaatgtaatgtgacaactcgatattcatctgtcggatggggcattgctagatgtacaataaaaggaagaacagtttttatagagtggaatttcccaactgcatcagaaaaaccagttggtatgttgttcacgttacgctcaaacttctatgggtatatagattcatttgaaactttcgaagaagaaatggtcggaacaagaagctttgaactccctacttccttcacattcattcaaggtgatacactttggctagaaataaaggatgggggaggattgcccgttactttacaattgacatctattgacatagatgaatatagcggtcaaagtagtagcgaacctaaatgtgatcacaattttgattttagagacacaagcatcacagtaggattagatctaagtactggcaaaatcgaagggtctattggttatactaaacgatgtagacttataatggtttacagctattatgatttaatgcacaagaaaacaatccgtggatattgctgtcaagatatagtcaatggcatcgtgaatacaaattggaatgatggtccctatattcatagttattattatatgtccaatgtagaatgtgaacttcgaatatatagtttatcttgtgacaaaaggattcctgattcagatacaagctttaacaacagcggaaactgtaccaattatttaagaacaacattctctttttctggaaatactcctctatattctctttctgaatatatggcaattgtcaaataacaacaagcattagagtttattgaaaatatttttacattcatgcgtatacatatataaaccttaattccgcaacactttgatttaactttatttataagttcctgagcaacaaaaagttgctcaggattttgccatgtcagatttttcacttatcttagtgttgcaaatcaaaacaagcgtaaatcgtaacaagacatggcaaaggtacaaataaaatctgaaaaactcacaccttttggaggaattttttcaatcatggagcaatttgactccatgctttcacctattatcgaccagacacttggtcagagatgccgcagtatcatcggataccagtacagcgaaattattcgttctctgatgagcgtatacttctgtggcggttcatgcgtggaggatgtaacatcgcatctgatgcgtcatctctcgtatcatccgaccttgcgcacatgcagctctgataccatcctcagagccatcaaggaactgacacaggaaaacatctcatatacttccgataagggcaagacctatgatttcaatacggcagacaagctcaacgccttgcttataaaagccttggtttccactggtgaactgaatgaggtggaaacctacgatgttgatttcgaccatcagttccttgaaacagagaagtatgatgcaaaaccgacatacaagaagttcctcggctacagacctggcgtatatgtcatcggtgacatgattgtctatgtcgagaacagcgatggcaacacaaatgtgcgcttttatcaggctgagacccacaagagattctttgccctactggaagccaacagcatccgtgtgaatcgcttcagagccgactgtggttcgtgctcgaaggaaattgtcagtgagatagagaagcattgcacgcacttctacatccgcgccaacagatgcagttcgctctacgatgacttgttttcactgaggggatggaagacggaggaaatcaacggcatccagtttgaactcaattccattcttgttgagaaatgggaaggcaagtgctatcgtcttgtcattcagagacaaaagcgcatggatggagagcttgacttgtgggaaggtgaatacacctacagatgcattcttaccaacgattatgactcatcaacaagagacatcgtcgaattttacaacaagcgtgggggcaaagagcgtatattcgatgatatgaacaacggattcggctggaacaggctccccaagtcgttcatgtcagagaacaccgtattccttctgcttacggcattgatacacaatttctataagaccatcattagcaagcttgacaccaaggctttcgggctcaaggaaacgagtcgcataaaggcttttgtcttcagcttcatctccgtacctgccaagtggatcatgacagcaaggcaatacgtgctgaatatctatactgaaaaccgggcttatgcaagacctttcaaaacagaattcggataagaatcctttctttccggttagaatctgcgtattacctcaagtcgcatcgtggggtaaggggatggtggctacatattgatgttgtgctgttgctttttactgaaagctgctactaacgactcataaatctacccttaatcgtgtattggatgatagttgcggattttaggataaaaatacacacatattaactctgctttatttttgaaagatgggaaattctctaattaccataaattctgaaaatatcccatctttctatcatcattattaagaagaatcgttttaaagcaaaattctttactcttattttttttcttctcgagtaaaccgtactatatagacagataataatctgttgacaagatcaattcatatctgatgcgaatagctcagaccctgttcgaaaaaggcacaaaagctctacctttccaagaaaaggtgaacaccttgcattcagccttttcagcttcgctcgcaaacgccttgccagaagtggatatcggctgaaggcactcttctgtgccccactactaagatgttccaggagagggtaggtgctttcagccctttcagcctgaaaaataattcgttcgaacgccagtagtttctcacaaaacagaggctgtattttcgtataacagaggctctattcagtacaaacagagggtctgtccgacgcaaacagaccctctgtttgtttctggactattagtctgtttactaatttaaataagccgatattccaccaaccttcatctcggggctgagtgacattcacctcggtggcgaatgaaattcagcctcgagcttacggaattcagcccacgtggtgagtaactataacttgtaatcccaaaactgaaagggctgaaagcacttatcccctcccaaaacatcccagagacggggtataaaaaagcgccttcagccgatatccacttctggcaaggcatttgcgagcgaagctgaaaaggctgaatgctagatataatccaatagtagtacggaggaaagtcagcacatcattcattggatagttgtacatcttcgactcaaatgttgtacaagaatcaagcaactcaagtacttacaaccattaagtcctatacttattggggagtactcttttagatgtctgattcatttcttatacaagaagttcattcataaccaaagcagaaatgcattaaatgtatttttgtcattcagacgaccaatgagagaaagaatctcattttttgtgtacaggaaaaaagattcttcgtcgttatactcctctgaatgacagaggctatgatggaccagacttaatctacttctctacatcttgaataaaccgttcaatataatcagtcggcagcatcccgaactctttcttaaaacacacactgaaatacttcggatcattaaaacctacgatatatgccaattctgaaacacgaatattatttcccttttcttccatgatccggcaggcagctttcaaacgcacattgcgaataaaagcagaagtattcaaacctgccaaagatttcagtttcttatatagagtcgatttactggtaatcatttcttcggcaaattgtgtctggtcaaatgcagcatctgccaaatgattattcacgcattcaatggcacgctttataaagtcttcatccagacttgtataattcaagtcctttacttcaaacaccaattgattcttgaagtcgcgtgccgtgcgttccttatacttcagcaggttacggatacgggcatgcaacaccgtcaagttaaaaggcttgctaataaaagcctccgcaccagcttcatacgcttctgcacggtcttcttccttattcttggcagtcaatagaatcaccggaatatggctgatttccaaatgaccttttacgtacttacagaattcgatgccattcatttcgggcatcatcacatccgatacaatcaggtcaatatcctcattctccaataccgtaattccctctttcccattttcggcagtaaagacattataatcacggttcagaagtttagtcatcaattgcagcaactcctcattgtcttcgaccagtaagatagaattggctttctccgccacttcttctacttcattggcagcttccacttgcgtgacttcataagtcaccgtcttctgtatcggcaagattgcttcattatctatttgttcttcttcataataagaacggtcaataggaatcctcacgatgaactctgttccctgatcgacttcactctctactgaaatggttcctccgtgcaactccaccaaatcttttgtcagggaaagtccgataccggtgccgatagtattgaactttcgataatctccttcgtaaaagcgtttgaacagcattttctgtttctcttttgaaatgcctttcccgttatccttcactttcaagagcacaaaatctttattttcatcataagacaaagttacttggataaatccgccttccttattgtatttagcagcgttagacaacagattatataatatcttatccaatttatctgtatcgaaatagccgacaatagcttccgggtcgcaaagtacagagaaatgtatctttcgtttcttcaccagcggttgaaaactttcagtctctcttttcacaaaatccgctatatcgcccggagaaacacgcaatttcaaatttcctgtctctgctttacggaattcaagaatctgctgcaacaatcgtattaatcgctgtatattgctattcatcaccgtatataaatcattatgactaggtgcctgtgtcttcaactcatccaccgtagccgaaataatagtcaacggagttaacagctcatgcgtaatattagtaaagaactgcaatttcgcatgattcaattcttctgcttttgctttttctatttcacgcaggcgcaatgcattccgaagcaacatacggttctttgttgtacggtaaatcaaaattcctacgaccaacacccatattatatataacagatatgcccaccaggtagcccagaacggaggaaggactaccactgtcaattcacgcacatagccactccattctccgttctcattggttgctttcaactgaaaagtatatgtcccgctcggcagattgttataataagcaaagcggcggtctgcatccgtatactgccaatccctgtcaaagttctgtagccggtaagcatatctgtttagttcgggattcttataggtaagggcggcaaattcaatactaaaattattgtatttatgaggaagttcaatcttactggtataggtaggcattaccggtgaaatcttttgttgcagttcgaccggcaatttactgaaagaatgattgaatattttaatatctgttatcaggaaattggtttcctgagaaggtatttccattttatcaggaaaaaaactgttgtaccccttatgtcctccaaaaaacaattctccatttcgactacacgatgaattgactataaagttatcctgcaacccatcggcagaagtatagatatgggttgagaaatcatttccaacagcagctacataaagtttcactagtccggaaatcgttcccagccataaattaccacttttatcttcttctatgctaacgataacgtctcccggaatactatatgcacgcgttttttcctcaaattctcctttgttacgattataaaggtataatcctcctccctcagtccctgcccacaatcgaccaaaacgatcaagatgtatacacaagactgtattcgtgattagtttacgattatgaaaactataattctcatatttcaatgtggaaggttgacggacatcccccgttatatgaatcacacccaaattagaagttgccagccagacactgttatccatatcctttatgatatctcttacatatatccagcctgccgacaaactatcattaaagttcatcgtttcaaagcgatagtctgtaccgtcagccaatctgacccctattcctcctcgcgtgccaacccagcaattcccttcataatcttcatataaagccgacacacaatcagaagtaaggaaaccgctattctttgtagtcaagtgttttaccttttcacctttccgatatacgtagattcctccattatacataccaaaccagatttcaccactcttcttacgctgggtaactgcgaaaagggatggcaaatcttttaaccccgaaaattccggtatgtgcgaatacatctttagctttcctgtttcatactctctacaggctagtccgtaagttcctactccaatccataggttttgatctgaatcagcaaataaggtacgaacggaagttaccggaatatcttcatctccaaagttaagtgtatataaagcaaatgtagattgacgtgtatcagccatcagaactcctcccccaatagcccctatccacatattcctctgagcatcacgcataatcgagttaacctcgtcagaaggaatacgataatctgtttttcccgatttataattaataaatgcgtccggttcatcaagttttaagatactcaacccactacgtgtaccaacccacagggtgtgagtattgatatcttctgctatatcatatactatattatcagacaaactggaatcatcaccgttctcatgcagaaaacgctgataagacacacgttgcatatctttaggattctgcaatttaaaaagaccatatccccaactccctacccaaatatctttattactatcttcataaattacatgagaagaatattggtcattgattttcggatatatttccactttatctgtggatggagaataacgaaataagccttgtgcccaagttccaatccagagatcgccatctgaatcttctaataatgattttatggtaacataccgcagtctactatctccaaagtcatctccacaaactacaaaagtatctttctctgcaacataacgacataaaccgttatccgtccccacccaaactgtattatcacgagtcacacacagagcagacactacattgttagaaagatatggtgctttatacttttttatttctccggttcttttatccatcacgttcagtccttccgatgtaccaatccaaagattattattattatcatcaaccaaacaagtgatgctattggtagtcaataaatccggagagtaaagattggatttataaagagtggtctcatagccattatactggcaaagtccattacgagtagcgaaccagataaatccatctttatcttgatacactttttgtacttcatttgtcggcaagaaatatggagcagaaagttgcttaaatttgaggttgtagatgacatcctctgtcgccaataacaaagcagacttcaaaagcaaaaacaaaatcaaaaaactcagcttataataaaggataacgattcgcgtgtttttcatatgatcatattttgttcgttaaatacaaatataatacttcacaactgtatatacgaccaaaattatgaataaaaaatttaataaacaacgattagacagttctagctttacagatatactgataagtagaactttttgaagggaaattcaccatataggcatttaagactcatcactatacataaaaaaatacagtggaaaaacacttccactgtacatttctcatattttaaaattactcaaatagaatcgtttttatctctttcgtatccagacgcactgtcacttgtttcttatcttccgaaatttctatcgaccggaccggattcaactctttctttgtaaagccattcttagcttcattcttcttccaaagttgaagtgtcatataaatcttgctaccagccaatttatcagaagccataatcaaagcacactcatcactgacaggatgtaaccctttcggatacgatgtatatagtttatcccatccagccaatggtatcatagccagttcatactctccgttatcaataaccggaatatccagcttgccgacccttcgggatgtttctttaaatacaccattcaaacgaggcagtgaataatgtcccaaacagatttccgtcggttcggagaccgaaactttatccactctcaagattccgttcggtagcggaatatcggccagttgatatcttactgtactgtctgtttcaagtacggcatcacggcgatagataccgtctttaaaactttggaacgtataaagccgtaatacttcccactcgcctttctgattctttgttccgtaattcatggatatttctccgttcttaccatccgccatccacgggaattccgtattgtaagccaatttgttataattctccgtactacgaaacttctgccagtcctttgcaacagtttcatggcaccatgagcgcatctcagcgcctccgctattcggataattcgtaatcaacaaattggttcccggctgaaacttattatagacattcccttttttcagttctttatcccaaggaccgttattttcggtagcagaccagaagtctgagttttccggtaacagcaaactcaaaaaagcttttccgcaccagtatacactaccccgacaactataaatctgcacagcaggagcaaacggaccataaaatcccatcgttggaaccccttcttccagaaatttcggattttccagaaattgcagcaaagtagaagaagcaatcctccttatccagccataatttacatcgccacttttatcatattcccatagagacaacggggcagtcgctgcaaaacgatagcagatgcttcgtccccacatattcatcttaccatcccggctaaacatatatggatagttagctaccatatcatgctggtttgccatgaactgctgtgccaactggggaaattgcttcttgccaaacatttctgcccaaatgggaccgtatgtctgataagcccacgcactgtaataatcataagccggagcatcattgtaccagccttcaccccgataacgtgccagcagtttcttcaaattcgactccagatagctctcatccactgcatagccctgatctttcagaaaacttaaaataaagacattaaagaacatccagttagagccgatggtcggtccttctccgtagctcagcatggttacagcaagcgaatccttttgcgcttttgtcagcgggtcccacaaaacagcctgagccgctttcattgaaatagccaaagaccctaactccagtaacgtctgactaggtcctcctttacgatgaggaataaaactcggacttttcggattagagataccaactaattggtgccgatagtaatctgctactcttattccattcattaccagttccggattatctttcaacaggggtgctgcaataaataaggttcgtgccagcccctccagcttagcaaccggaacttgaccgtcattattgggatatgttttgtccagttgcttcggaaagtacatctggtcatccaacgtatggatataaccgaatgctcctctcagcagatactcacccgcctgtatccagtgttgacgtgtcattcccgtataaggactcttttgaaagtcaggctgctgtacagtaaacacactctcctgagcaatggcgactgacagttctgccaacgggagaacaaataataaaagaactcctatcacaaaatctcttaaaactttccttctcattgtatttctattttttgatccagcaatccgttaatatacacacataatactcccttcttatactccagctctaacttgaaactcccgtacttttgtggagtgtaccactcaccgcctgtattgcgcgaagttgttttccagcaatcagatgttccaagtatatttgtgctaggatatacctttccgttatatctaacttccggtttcatggtttgtccgttcagataatattgaagatcgcccaattgtaaaaggcacccttgataattgtccgcatccagagtgaccgtttgttccaatacaaaagccaccttcgggttgaacttaaaatccttctccgctacaacatttttctttttcttcgcacccgggaaacctttaaaatcacaggcaatccctgtgcaataaccttccggataccgtgaactgacaatccaatcgtaataattgccatacatccatgtgagccgcaaaggcgtattttttgaatcaggtattatataaggacggacattattctgctgcgagtcttgcgtaaccgcttctgtagagaccacctccccggcctcgttcaagataaatttcacgatctcgtaaaccttcccttgctttccttccacaggcaacgagcaataaacatgattcgcattcgacggatctatagtcataccggcactgtaacatttctccaagtttggtgtctggtgaaaatgcccaccggcgttgccaaggaatgtcttcttccattcgtgtccgttccacttcgcataatagtaatcatgggaattcttatcactgctgattcgcaccattgcaatgaccggattatcattctcatccaaagcaacctgccatacccaatcacgtgcggatggattatctaccagagtagatggatactgacgcacatagtcacccgtcttattcactttaaaagtaccgtcagcaatagtcgaaagagtattccccttaacatccttcaactgcaaagaatgaacatctatataattaaagtacaaaaaattaggattctcattatccggatgaccggtcgtataagcaaaataaattttatctttcccattcgacatatacttggcataaggacgggccccggtagactgtactatctgatacggtccccattccaccgccacccgatcattctgatcgggcaacgacagcttggcgatagtagggtgccagccaatcccccgccaacagagatagatatgttccggatcatccgataagataaacggagacggataggtagtattgtcctttgttttaatcaccttttcctctcccaatgtcgtaatatctccgggaatgcgagaaatacgatagtagaaacaaggctcatccgtgtgacgggaataaaagatcataatccgttcatccggcaataccagaaacgtcggattattgtgatcatccggttgaaaataagaacggatcagtacctcgtcctgtcttttctttttaaagtcatactgcatcgctttaatattgccgtgtatatcaatatagccgatatatgtcttgtttattgtacctttttcattctcataatgcaatgcgcgcggatcagcaaaccaacaccaggctccttcggaagttacttcatacacttgagaagatgctacatttttatcactgccgggatttacagtgtcaacttcgtgtccctgcaccgacagcaaatgacagaacaaatataaaatcagaaaaggtaaaatcagcttcgctctcatggtaaccaactattttttagattcagcgcaaaaataatgctttagatacaaaaggacatccgaataccgttcattaaagtccaaatttagatcatcttctctattatgaatgataattaccctcctttgacagatatgtaacctttttatttaggtggatcccctatctttgtcgtacttataatataacaaaaatctaactgtaaatatcatgaagcatttatttaccaaaatctttctattccacttattactcatcggagcagtacaagtaacggcacagaataagaaatccggtaaccctattctgccggggttccatgccgacccggaagttctgtattctcatcagacaaaacgctattatatttaccccaccagtgacggatttccaggatggggcggaagttattttaaggtcttttcatcgaagaatttaaagacatggaaagaagagactgtgattctggagatgggcaaaaatgtgtcttgggcaaacggaaacgcatgggctccctgcattgaagaaaagaagatagacgggaagtataaatacttcttttattatagtgccaacccgacgaccaacaaaggcaagcagataggagttgccgtagccgactcccccaccggacctttcactgatttgggcaaacctatcatcacctcttctcccacaggacggggacagcagattgatgtggatgtattcaccgaccccgtatccggcaaaagctacctctattggggtaacggctacatggcaggagccgagctcaacgacgacatgctgtccgtcaaagaagagacaacggtagtattaactcccaaaggagggactttgcagacttacgcataccgtgaagctccttacgttatttatagaaaaggagtttactacttcttctggtctgtagacgacaccggctcacccaactaccacgttgtttatggtaccgcccagtcaccactcggtccgatcgaagtagccaaagccccgatagtactcattcaaaatctaaaagaagaaatctacggacctgcccacaactctatcctgcaagtaccgggaaaagacaaatggtatatcgtataccaccgtatcaacaagaaccatctgaatgacggaccgggctggcatcgcgaagtatgtattgaccggatggaattcaatccggacggaacaatcaaacaggtaatcccgacaccataacaccacaatagagattcatactaaaataataccaagatgaaaaacgttctgactgcgacattcctgacctgcatctgcataacaggcagcgcgcaaataaatcatggatatcctatagaccctgtcccctttacttccgttaaagtgacggacaacttttggggacagcgctttcaagcaagccgtgaagtaaccatccctctggcattcagcaaatgtgaagagacgggacgttacgaaaactttgtaaaggcagcacatcccagcgatacctacaaagtagagggcttctctttcgacgataccgatgtatacaaaacaatagaaggagccagttactctctgcaaacctatctggacaagaaactgcaaaagtacattgacagcgtactcgtcatcgttgccggagcacaggaaccggacggttacctttatacagcccgcaccatgaacccgaagcacccgcacaactgggcaggaaaagagcgttgggtagcggcagagaacctaagtcatgagttctacaatctcgggcacatgatagaaggagctgtagcacattatcaagctaccggaaaacgaaacttcctcaatattgccattaaatatgccgactgtgtctgccgcgaaatcggcaacggccctcaacagaagaaatacgtaccggggcatcagatagccgaaatggctttagtcaaactatacatggtgacgggagacaaaaagtatcttgatcaggcaaagttcttcctggatacccgtggatataccagccggaaagacgcctatagtcaggcacacaaacctgtggtagaacaggatgaagccgtaggacatgccgtacgtgccgtatatatgtactccggcatggcagatgtggcagccatcaccggagacagcagctacatcaaagcgatagacaagatttgggacaacattgtttctaaaaagatttatataaccggaggtatcggtgcacgccatgcaggcgaagcattcggcaacaactacgagctgcccaaccagtccgcttattgtgaaacctgcgccgctatcggcaatgtatacatgaactaccgtcttttcctgctgcacggagacgccaaatatttcgatgtcctggaacgcacactatacaacggtctgatatcgggtgtatcactggacggaggttcattcttctatcccaacccgctgtcttctaatggaaaatacagccgcaaaccttggttcggctgcgcctgctgcccttcaaacgtcagccgtttcattccgtcattaccgggatatgtatatgccgtgaagaacgatcaggtatacgtgaacctttatctttccaacaaagccgagctaaaggtagacaagaaaaagattctgctggaacaagaaaccggctatccctggaatggggacatccgcctgaaaataacgcagggcaatcaggacttcaccatgaaactccgtatccccggctgggtacgtggcaatgtacttcccagtgacctgtattcttacgccgacaatcagaaacctgcctaccaagtatccgtaaacggacagacagtagaaagcgatgtcaatgatggctacctcagcatcgcccgcaaatggaaaaagggagatgtggtagaagtacatttcgacatgatcccccgaatagtaaaggcaaatcccaaagtagaagccgatcacggacgtgttgccgttgaacgcggccccatcgtttattgcgcagaatggccggacaacagattcaacgtccacagcatacttctcaaccaacatccgcaattcaaggtaacagacaaaccggagttactttacggcatccgtcagataacgaccgatgcgcaggcattaagttatgacaaagcaggaaaactggtaactaaagacgtagaactcacattgataccctattatgcctgggcacatcggggcgaaggcgacatggaagtatggctgcctatcgatgtaagcgccacgtcggcacagccacagaaagcgggacaatgggaagataacggattctttaagaattaataataagctgagtcgaagataagaaagtacagagagctttttaggcacggatttcacggatgaacacggcttttattcattaagaccgtgtaatccgtgaaatccgtgcctaaaatatcaattagccattatcttcacatccggcgaaggggcccggaaccaatattccgtcacttttcttccctgtcccggaaccgtaaaagacaacttaatcagattatcatgcaatcgttccacactgatttcattctttactccttgtataaaaaccggatcaaccgatttttccaccatctccacgtaagtgccatccgatggcaaactgtactctccctgacaatagatgatggcatttgacctgccgttcataccggctgtcattatattcatgaatgtctgatcaggcgatatgatctttataacaggcaataacagaattttatatccatgttcgcccggttgcacaacacaactctgccatactccttgcaaagacctgttttctacttcctgcccgataggtactacaagttcggggaaagtaggtctctgtgcctccggtctggacagattaaacattatcggagctgtaaaacgtactttcactgcctcgcctctatccattcccggtttccatttcggcattaatttcactacgcgcaaggcttcttcgtccagcaagggatcgattcctcttacaactttagcctgatccaatgttccgtcttccattatgacaaactgtacgatcacacgaccggaaacgcctttcttctgtgcttctacaggatacttaatatttgtagtcaaaaacttcatcatcgcctgcatcccgcccggaaactccggcatttgatcgggcatcagataaactccatcactatctaccttctctacaggcttttgctgggcaaacgaaggcaggcataccaacaatgcgataaacaaaccgaataattttgtgttcatggctatcatattttaaggttaaacaataccgcaagatagtgcatttttattgaaacacagcatgatttgtctatttctttttcacagatgtctatttacttattatccttactttattactgccacaaatcctccacgaggaagacatgacatatccattttatcgtttgataactggatgttttcttcgatggcaaaactcttatcgtccaccccatccttaaatacatccatcgtttttccttcaacttgcagaggagccaatgaaaaagaaagaattttattctcgttagttccgttcaatcctccaatataccatacatctcccttacgtcgtgccagtacgatgtcagtacccggataaccacacaacagttttgtatcatcccaggcagtaggtaatcccgaaaggaattctcttacttttcgaggtaatgaactgtacacctccggcctatcaggcatatgctgcaatgctgactcaaacacaacagacaaagctagttcatgcccacaagtagtgatatgaggatgttgggaatcagagaatgtaccaggtgtataatccattgagccaatgacatttctggtaaatggcaatgttacattatgttcagcagcacgatctgtaagtattggcttattgttataccactctgccccataaacggcttccatagtcatcagatgaggataagtcctttgccatccacgaggaatagtagctccatgaaaattgaccattaatttatatttagctgcatcttccagcaaatcaatataataatccatattagacgaataatcatcaggaaaaaaatcaatcttaacccctactacacctgacttttgaagccaagtatattcctttattctattttccttactattcaagcggtaaagaggacccggccccatccaagcagttgacgaattataccaaatcataggctttatatttcgactaagagaataggttatcaaatcttcaatatctccaccgtttgacatttcattccattccgcatctatcagactatatggccacttcatatcaacagccaagtcaatgtagtcttttacaatcttgaaatttttggaaccatgattatgcgcccagtatacccatgatgcagagcccggcataatccaacttgtatcagaaattttgttaggttcagagacatctgtcactaaagtagattctacaacatcagacaaagaacctatcataagaactctccatggcgatgtgaatgaatcacccaaggctaatttatcatctgtcatccgcacttgatattgattcatatcatttccattatacaatctggaaccactatgtccacgaagtatattggcctcagttatcaacacaaacaatgaatcggctggttccaaaagtaatggatagccccacatattgtctttgcctctttctgctctggttttcaatggatagaaaccttcataaccaacagaataattctgtatccatcttttcgttccttctggaatatagtaagctgtatgttcagatgtcagactatccttatcttgaacagatggtaagctatatcgaaatacaatcccgtcatcgtaagccctgaaaacgatatctaaggtttctgccttctcattctcaaaccgaaatatcctttcatttcctctattctgacaatgacttcttttaccggtaagcatcacataatcatcttcaattagtttagtaccggacacagatttcaacctgatgttatcggtaaatgacataagctgggtttccaagccaattcgggtatcagatagaacccttctggaagttttaccatctttgtactctacattaaaaaagactttgccaaaaccgtctttttcagtatcttcctttatttcaacagaaagacatatcttcccattaggagaaatcacacctgtatctttttgagaacaagaacagaatggaatacaaatgagcacataaagcagtaattcataacttaaacaattaaaggaatgtttcatacactaaacagttaatataaataaataaactcatccacatcgatataccccgcatccgctatattattaaaacagtaaatcccaatgcggcttccccggtaatatccccattcaagttgatatacctctccgaacggggtaaacttcctgccatctgtactatatgaaaattggctttttccatccagcccccatacagatttaatccacaccttgtttccctttatcgcaggacctgtgattttctctttattggtctgaaattccagattccggtctttgccggactggcgtacccccaccatggcataactcttagagtaatgacacagtccggctttctgtccgtcaactatgccctcaatgttcatttttacaataacttcatttttgtttgtacgaaaacaacgctgagtcaaggtatttcccgctttcagcaaattatccgtgactaatggacgaaaagcttttaaccgcaaattgcctggtctttccgttaatgaccacatctcgtcccggggctggtagttccattcccattgaggagaaagtaccgacttgctaaaatcatcagatgattgtggagtccgaaccggatactcattggaaggcttggccgcttgccataccattgtgccaatgccatcctgcccaacctcaccaataatcggccaaccatcgacccaatataccggtaacagactagcaatccgacctgcccagtcacccgtaccatggtgggtaaagaaataccacttcctgtcaggaccttcaacaagtccgccttgattaggctcattatattcacgctgtacatgacttaattgtttcctttcaagatatggtcctgtaattgaagaagaacgttgcatcatgatatatctaccgccatttttaacttcactgaaaaaatgataatatgttccgttgattttataaagtttacttgcctcgcgaccatacccctcattaattaatattttagagttttcgatcaaggtcttcccatcaggtgtcatccggtacaggtaagttttgtatttatcagcaaaatgggtacctacaaaatatagttgcccgtcatcgtcaaagaaaggacaacagtcatcccatcccttttctgcttttacacagtgcaacggttcccacggtcccgcaggatcggtagctgtcgacataaaataaccttcatccggtgtaccgaaatacacatagaattttccctgataataacgaattgcccctgcccaaatacctcggccataacgattcatacgcgtccagttcatttcttcactgatctgtctcagatcagaaaccacatgacctttaatcgtccagttcaccaaatccttggaatgtatgatcaccatacctggggaatattgaaaggtagaagaaatagcataataatcatcccccacacgaatacaatcaatgtcactgtaatcggaaggaaggacaggattacaataggtgccatctccctgatcgccccaagttgtccattctccccacttgtaatcattctgtgcaaatacttttactgttaataaagtaaaaatcaatactacaatacatgtgttggttttcatattctttcttatattcatacactgtgttacaggattatcctgaattctttttattctcaatctctttcaaataatataccacaaatgtagcaaatcaatagcttatattataggattaatacgatttagaataatataatatcgacataaacagctatagcggaattaatcataaaacaatatcgacattttatttaaaattatcgatatcaaaagagtaatatctattttttatttatctttatctctacattaataaaacctgtatactatggcatcattcgtcgataaattgcacccgcttgtattgaacataggtttggctattcataatgccgactggaactggaaaaatgtcagtagccctttcacacgtttatactatgtgacagaaggtacggcacaaatcttaatatcaggtaaaatccagattttaaaagccaaccacatgtattttattccagcgtttaccaaacatagctatatctgcaactcttatttctcccactattatctgcatatctatgaagaacaccagtcagacaacaacttactggacaattgggattttccaatagaaatacctgctaccgaactagatttggcattatttcagcggctctgcgctataaatccacatatgaccttacagaagtcagaccctacttcttacgataacaattacacacttatgcagaatctgctaaaaaacaaacaacgaacattatccgaaaaagtagagtcaagaggtattgtataccaattgctagcacgatttctacaaagagctcaaataaaaatggtattaaaagataaccggatagaagaagccatccactacatccgtaagcacataaatgaaactattgaattaggagtattagcagagaaatccggcttatcaaaagaccattttattcgcctattcaaaaaagagacaggagatacacctttaagatatattatccgcaaaaaaatagagaaagctcagctcatattaataaccgatgatatgtcaatcaaaaatgttgcattaaatctagcatttgaagattattcatacttcaacaggttattcaaaaaaatcaccggcgttactccccaagaatatcgtacctcttatcattcttaataaaaaaggaatagcgtagaaggtgctattccttttttcattaacaaatagtaaacgattacatagtctcaactaatcttcataaagataaaacatacgttccatcaatttccatttctccgcagacgagctcaaaggcgaacattcttgaaatctggatacatacttttcccagtcagcctgtcgcggaagatgagataatttatccatagctatctcccagtcaaagtcaagcggagtttctataatcataaagagttgtgatcccaatatataaatttccatttccaaaatgcctacagcacgaattcccgctctaatttccggccaagctttttcttcactatgtatcttacgatactcttcaatcagcatcggatcatttttcaagcttaaagtttggcaatacctcttcgtcggtatgtcatactctttcattttgtatccctgaatatgcggcatgacagtgctttctattttctaatcttaaaaacaggagctatatttttcaatgacttatttggaatattgacaataagtcccttatctgtacgtgagaaaggtacttttccgtaaccaagcaattcaactttacttatcttattgggatatagttcattcccttccgctaaagatttaattaatattttcccatcttcgggccattccaagactgtagcatacagatttttctctgtctgtgtaaaacgtatttcttttgcatcggctttactataggccccttcgttaaatccctgtgctttaagttgaacatttccttccgctataggtccctctccaaatactttccaaggacgtgtatcatagattgcttctttattaatgttcatccaagcaccaaattcattcaatattttttcttctttttcatcaaaagttccatctgcacgcaacggaacacttaagagcaagttaccatttttgctgacaatatcaactaataattttacaacgtcagatgctgacttatattggttattatcatatacagacgtactgtagtgccatccgccaaggcacgaacatgactgccaggattcatctattattttatttggagctccacgttctacatcccataccaaggctttacgttgatcagcatcaagcatcttaccaaacattacagcattcaatttacccttttgcgtagacatattatgattatagaaatgagcagcaatctttaaacctgcatcacttataggataaaaaggtgccactgttacatcaaaatataataaatccggattatagcggtttattacatcaagtgtacggttatagaaattagtacaatactcctgtgtcggcaaacaaactccatttccccatgcccattgcctgtgaattgcaccattatcccaactattctgactcaacggatgattctgagcatacaaatcctgaggatcatatccttcccaccattttcccttgccatcagctttcgttaatttcccatcatatgggacaccttttttaggtccttgagtatcatgtctttgagctgtttcataccaactccaggcatgatcagcatgcaggctgacgccaaaataaagtccatgtttacgcgctgctttctcccatcctttcaatatatctttttctggtcccatattgacagagttccatggttggtatttactatcccaaaggtccatgttatcatgatggttacccaaagcaaaaaaatactgagcacctatttttttatagaatgcaaccaacttatcaggattccatttttcagccttccataacggaataatatctttaaagccaaattcagaaggatgaccgtaattcgctacatgatgccgatattctcgtgaattttccatatacaaatgacgagccatccaatcgccgcttccttccacgcattgaggtccccaatgagcccaaataccaaactttacatttctgaaccattccggtattttataattagacaatgactcccaagtaggttggaattttccttgcatcataggttcatcttgttccgagacaggaacttgataattttgagcagataaagtccccgccacgaacaataaagacagtaacagtagtttttttgttttcataaatattacgattgaattattgattacaaacgtactgcttttttagtagacattaataggatgaatacgatctacgataagacaatatcgacatctatcgtaatcaggaaagcatatagctgattactgtccatacagttctcatattgccatcttcctctttggcttattaataaatattccattcccagataccggggactccttttaggattttaattctcagataacggaaccttttattcaagacatcggtatgtggtgaacacatcttcctatcttgatggacagcgaactcttgccagacttttccatccatcgatgcttcaataacataagcatgtccggcagtagggcgtacaaaataaatttcactgcgtctgaccttctttacagtacccaaatctgccacaatccatggattaatactatcttcggcagcagacatccatcgggaaccatttgccccgtccaccgcaaaggaaggaacaaaatattctgtccgcagacatgtcgggtctttcatcggttcaatcttcaacggtacttcaatactagacgcataaactgtatctatttttatttttttatctggtttcaccttcttcaatgcccccactccatccattgttagttcgacagggcgaatcgtaccgtcttcattaaatttcagttgattcacatatgtctgacggtttgtacttcgcctgccaaactctaaatatgcgaaataataattatccgtaccctcaggatgaaagacacaaccatgtcccggtccgaagattccccgttcataattggtagtagatattatatcctgttcaggagcttcaaaaggtcccataggggaaacccggctcattacatacgcatattgatatttctcatcccctccgatagtgtacaaataataatatattcctttacgtttgaaaaagataggtccctcagagtactccttgcgaggagtagaaattacctgtactacagaatccaccgtaatcatatcctcgttgagtttggctacatgccttcgtccccaaaacacataagcctgtccatcgtcgtcaacaaagatttcagcatcaatcccgcccggattcttactctgcaataaagtagaaggagtaaaaggcttatagaattcgtctttcccacgtgccagtttaaacggtccttcaggcttatcagctacagcaggatacatatacccattgatagtgggatatatataatatttaccattagcaaaaattgctttactgggagcccaatacttctcctttgcagccgaagggaagtaagttccatcaaaactccagtgtacaaagtcttttgatttccatactaccggagggcctgatgttttaagtccctgcccatagccatcagtagtggcatagcaataaaagacaccattaatttcctgaatactcgcatcggcaatcatatccggaatcaatgcattgccaaaaggattattgtgctgagctttcactttccctaacaacatcattaccagcacaaaactaaaaaagatctgtttttgcatactattatctattatccaaagttaatgcctgattcatacaaaaattacagttgaataagacaatgcaaacgtactttttttctggtaagtttaataggataaatacgatttacgataagacaataccgatatttaaagtaacagcatttacaaataaaccatattgacaggcttactttatacaaagaatacctccttgagggcggatttccaactgcaccttaccgttttccttcactttcagcgacgttaactccggttctccctttttatcatccttataaagagccaccgtctttccggcaaacatttccaaatccagttttagttccagcggttctttgccggcatttacagccgccagataccaggtatctccctgacgacgggccaacaccacatacttccccggatagccatcgacaaaccgtgtctcatcccacgttgtgggcacccgcttcataaagtccatgcaaacagccggaacatctttcagattgttaggagccagtgcaaagttctgaaccggattctgaaagagaacggtagtcgccaactggaacacgtccgtagtccggcgtgtcgtaccgccgtcgttattacggttcaggcgcttattcagaaagcagccgccaaactccatcgatcccaccgtattgcggataaacggatgcaggcaagtattgaacgcttcctcatcacagaaatgctgattgaacaccatattttccgaagccagcactgcttcactgcccacataattcggatacatacgctcccatccgcgaggtaatgtgcaaccgtggaaaatcaccatcaatccgtgatcgtccgcatcgctcagaatatcttcatacagccgcattgtctcctgcttgtcaccgccgaagaaatcaaccttgattcccttcacaccgagactttgcagccatttcatttcacgtttacgaatgattgcattatccattcggttcaccggtccctgttcaatgtcattccaatagccggaagaactataccacaagaacaactcgacacctttatcgcgtgcatactcaaccagcgacttcatacgctgatgcccgattctagtatcccaccagttatcgatcaacgcatactcatatcccatagccgaagcaaaatcaatgtaacgtacctgatcatcatagttgatactgccgtcctgccaaagaatccagctccacgtgccacgcccgaaacgataatcatgttttgtttcataaagcgggcttaccacatcccacggaacggttgtttctacaatcggcttcagatgatctcccactgtgatggtacgccacggagtagcgccgggcagtgcaaaagcaggagcgaccgttccgtttccattattttcttccgccatcggaaaggcgaccgtatataaattcccttcactcacatcactcaaacgtgaaccgcaataacgactgtccacacccgtctcgctgaccagcacccaaccgtcatttcctatacgaaacaaacaagggaacgtatacccatgtccgtactgcgaacggtcgctcatcggcgcatccgctttatattcttcttcataactgggtttcgtacgtttccagccaatcatcgcatcgctctgcggacacaagaaagtagtagtctgctccggaaagcggaaacctgtttgttcttccttcaccgtcacactcgcttttcctccctgatgcggcaaagtatagcggaaagccacatcattatcactcacccgaaaaacaactcccagcttttgtccctgctcattctctaaatgacaagtcagttcattggcacggtaatgtacgttggaaactttgatacgtgtctgttgataaacagtgtcgatcttgtcgacggaatgtccggtcagtttaagattcttcgtaaaatcaccgatattggtattcatgcctaaaggagacttttccaacatcgtctttccgttgtaactcacagaataacaaggcttcgtctcgttttgcacaaataccgccaactgcaacttttcgtccggtccttttacaaccacatcctgtgctgcaagagtgcttataccaagaatcgctgtcaaagtgcttacaagtttcttcataatattatttttcttttatgattaaatgtcctcattgtaacaaaagcaaaaatagggaatataattatattcgcatacaaactttcatcgtttgcatgatttccccccttttttgattgatatgcagacattccctcccgaaaccctttacaaaaagaacagtttatccaagtataaccccgactttttttatctttgcatcatcgaacatcataatccttatcccaatggcggcaaataaccagaaaaacacccgaatactactattcctcctcctgtgtatcaggatgacactgacggtggacgccaacgacttcctgtttacatcgatcaacacggcacaaggattgagcgacaaccagatacgctacatactccaactccccgacggaagaatggtattcaccaccaacgggaatgtcaatctgtatgacggcgtacatttcagctaccttcaccgcacagcagaagacgtttccccgctgaaacagtatgaaggatgttaccgtatctatcaatgcggagattcactcctatggattaaagattatcataaactgatgtgcatcgatctccatcaagaaaaatacatacctcaccttgactcctatttccgcagaaaagagatacacgaaccggtagaagaccttttcgtcgacaattcgggacgtatctggctacttacttcccaggagttgcgggaactgggaacgggcatccgcctcaccctgccggaaaatgagcatcgaaagctacaggacatacattcggatgaacttgcggtttacctattctatcataccggtgaagtcgtttgctacgacccgaaagccggaaagcagttgtatgacagagctgcttatcccgcttccgaacaggagaacttcaaccgtacttctctcgttgtcaaaagcaaaaaaggattctaccagttacgcaacggccgcaaaggaggattcttctactttaatccccaaaaccggacatgggagaagctgttcgaacagaactacacgctcaacaccctggtcatcactccacagggcgataaagcttatatcagttgtgttcacggtttctggatcatcgacctccaaagcagggaacagcaatacatccccgtactggaaacaaagaagggaaagctcgtttcgaccgaagtcagcaccatctttcaggatgcccagggcggattatgggtaggcacactcaatcggggattactctatcatcatcctgccacacacaaactgattcacgtcagccgcactgctttccccgcatcaccggaagaggacattgccgtcaaagcttttgcagaagatgataacggcaatatctatctgaaaagccattccacaatctatcagctagctgtcaatcaggacggttcacggactctgctgcctgtaccagcctcatcggtctctgcagaattggcaaaggaattagatcaaagaggtggaaacaaatattacagaaggcaatcatacaccgctctatgcaccgacacacgtggctggacatgggcagggacagccgacggactggaactcttcaccgatcaagagcaaacaccggatagcaaaccgaccacacaaacagcagataatcaccccgcctcatccaatacccaagcccaccgcattttctatcgtgaagacggactgagcaataacttcgtacaatcaatcatcgaagacagaaacaactatatctgggtaactaccagcaatggcatttcacgcatccatatcaatccggagaatcaggaaatcggctttaccaacttcaatcaactggacggggctttagaagaggaatatatacagggagctatctttgaatcttcggatggtacactctatttcggaggcatcgacggctttaccattttccgtcccgaccatgaatccgccactccgggcctgccttacaaaccggttttcaccaacttacatctctacggtgaaaaagtaaacacgggagaaaagtacggaaaccgcatcatcctgccacaagccgccccttacacaaaggagctagaactggactataaccagaactttctgaccttcgaatgttcggcactgaactacgtgaacagcgaacgcacctactaccgctaccaactggaaggcatcgacaaacaatggatgaacgctttcgccagcggacaagggaatgcaacagtcggcaacggcatcctacaggcctcctataccaatttaccgccgggagaatatacattcaaagtcgctgcatccgacaaccagttacaatggaacgataacatcacaaagatacacgtcatcatccacgctccctggtggaaaacgactaccgcctacgttctgtatacgatcatcgtgttactgattgtcttagcaagcatccgcctctatatctatcagaccaagaaaaagatgaaacagcaacataaagaagaaatcctgctgctccgcatccgcaacctgatagagcaatgcaacagctatgaagccgaacagaaagctcgttcggagaagaaaagccacccttccgtctgcgacaggaacgaaacggcagatgataatgaaaagccaaacggcatagaaccggacagtgcagaatccgcctttttagtgcaagcgatagaactggtagaaaagaaccttgacgtcaacggctactccgtagagcaactaagccgtgacctctgcatggaacgcaccggactctaccgcaaactggtgactttgctcgaccagtcccccagcctctttatccgcaacatccgcctccaacgggcagcgcaactacttgccgaaggcaaactgagcgtaaccgaaatagcggaacgtaccggcttcagcagttccagctacctaagcaaatgttttcaagaaatgtatggatgccgtccctcggaatatacggagaaagcgaagaaatcaacctgattgttgtttgtttcaacatagctattgtccgcaaaacgtccttccatcctacctttgccgtatcataaagcacttaaagaaaccatgaaaatgaatctaagaaaaacaggcatcctgttggcatgggccatgatcattgccgctaacggtacggcacaaaacgtacaacgtacttcccaaggcatcaagtatgcagcacaagggatgaacgtcagtgtagaattttattcgccttccatcgtccgggtatataaaacgcccagcgaaacggcttccgacaaagaaagcctcgttgtcatcaaagcaccggaacaaaccccggtttctttcggtgaaaacgggaaaaatgtaacattgagcagtcagatgatacaagtggaagtgaaccccgaaacaggcggcatccacttcttcgacaagctagggcaactgctgctgaccgacaaagactacggtacacagtttacccctttcaatgacgcgggcgtcccttcctacaatgtccgtcaggctttcctgctggataaggacgaagtaatctacggtctgggccaacagcagaccggcaaagtgaaccaacgcaatcagaaactctttctccgcaaccagaacatgagtatctgtatccccttcatccactccatcaaaggctatgccctctactgggacaattactcccctaccaccttcctcgacaatccgcaggaaacctccttcgactcggaagtaggcgactgtgccgactactacttcatctacggcggcaacgccgacggagtcatagccggagtacgcgacctgaccggacaagccccgttgtatcctctctggacactgggcttctggcaatgccgcgaacgctacaaaagtccggacgaactgtgcgaagtcgtagacaaataccgggagctgaaagttcctctggatggaatcatccaagactggcaatactggggctgcaacgagaactggaactccatgaaattccagaatccccgctacatcaacaagatgggtgacccggaatacatgaaattcctcccgaacggagaagacaagaatgccgactacggcactccccgcatcaaaagccccaaagaaatgatcgactacgtgcacaagcagaacgcccacatcatgatctccgtatgggcctccttcggtccgtggacagaaatgtatcagaagatggacagtctgaaagcactgctccatttcgaaacgtggccgcccaaagccggagtcaaaccttacgacccgtataatccggcagcacgggacatctactgggaagcgatgaaaaagaacatcttcgacctcggcatggacgcctggtggctcgactccaccgaaccggaccacatggatatcaaagaccaggacttcaacacgcagacctatctgggttctttccgcagggtacacaacgccttccccttaatgtccaacaaaggcgtatatgaacaccaacgcgccactacttccgacaagcgcgtattcctgcttacccgttcctccttcctcggacagcaacggtatgcttcccattcatggagcggagacgtaacttccgaatggtccgtcatgcgcaagcaactagcggcaggactgaactatgcgttatgcggcatcccgtactggaatacagacctaggtggcttcttcgcatggagatataacaataacgtaaacaacatcgcctatcatgaactgcacgtccgctggtatcagtggggagtattccagccgatcatgcgttcacacaattctagtccggtagccgtagaaatctaccagttcggcaagaaaggcgactggtcatacgatgcactggagaaatacactcacttacgttaccgcctgctgccatacatctacagcacttcctgggaagtgaccagcaaagcaggcagcatcatgcgccctctcatgatggacttcccgaaagacaagaaagtgctcgatatggacaccgaatatatgttcggacgcaacttcctggttcgcccggtgacggattcattgtacacatggcaggacaagaagcaaaacggtcatcagaaagacatgagcaaaatcggaaagaccgatgtttaccttccccaaggtgcccgctggatcgacttctggaccgggcaaacactggaaggcggacagaccctgcaacgtgaagtcccgatcgacattatgccgatctacgtccgtgccggctctattctcccctgggggcccgccgtgcaatactctacggaaaagaaatgggacaatctgaccatccgtatctatccgggagcgaacgcggaatttaccctttacgaagatgagttcgacaattacaactacgaaaagggagcttactccaccatcaccttgaaatggaacgaccaagaccgtacactgaccatcgacgaccggaaaggcagctacaaaggaatgctgaaaagccgcaagttcaacctcatagttgtagaaccgggaaaaggctgtggcgacggagactcaaccacctttgacaaatccatctcctatagaggtaagaaagtgattgccaagctataaactgacgataatcagataactaacacgagttcgatatggtccatcttgttggattatatcgaactcgtaccatagtaataacatgcttttctattgtcacttatcacttttgaaggataataaactgattatcagaaatcatttggtgataataaggggtgataatagggtgacaatagccatatatcacacattttattgtcacctttccccatcctattacttgttacttattacgttcccctatatccagcccctaaccttatacaacaaataccatatactaccggtatctttcacttatagtgcctttattcttccattaagacactgatattgttagttgttcacggccgtggcaagagttgatcacgaccgtgagcaatgctcttcacggatgtgatcagacctgttcacggccgtgaacaactaaagatatcggtgtcttattcctactttccctataggaaaaagcaaagatgcaagaggttaaagagaactttagtactatcttacggctgattacactatagacagcaaacgaactacccattcggtgaaagatgaaaaccatcttttctattatgaagaagaaaagagaaggcacaaaagtcaataatacctaaaactgggctaactaaaaagtcggtagtatctcaaaactcccctccttccgggaagaaggggtgcccaaagggcggggtggtaggagaaataatgtttgttcctatttctttgtaaatgacaggattatgtattcacctaccacctccccctacgggtactcctccttcccgaaggaggagatttaggatactattgactttttagtcagcccctacccacagggggagatgataggtgagcacccctccccaaaataaactaacccctattgaaaaccagtttattgcttattttttcccttttgtgtcttcaagcggatgaccgtgaacgaataagccggcaattcctgcttgaagctggttcctgcctctatcgtatccgtcaccggaagcggagtcgtctcgggtgcacctgccagtacagtccgcgtagcggaagactggataccatccattcccggcaaccggacatcggtctctatgctgacgggcaacagattgactaacttcacaatcacatcccccgtcttactgtcacgaacgatggaagaaccaacacggagttttacgcgactgtcctgattatcaaggtttacctgtgaagggatgtaatggtcgcctgcgtgctgaccgtagagtttctgcacatagtaacccgttgtcggtcttacttcccgattgttgaagtagatcaagtccggattccactgcgtccgtccgtcttttgccagcagaggagcataagaagtcatgtgcactacgtctccattccgttccaaagcagccagataaagcgcttcggtcaaagcagtttccatattcgctctgcgtccggagatatgagtggcatattcgcccagatatactttcgtttttttagagcggtcgtacttgtcatagaagtcctgattgtgcaggaaccatcccggagactgataataatgttcgtctaccatcggaacaccgagtttgtccgccagtttccagccttccacatagtctgttccctcattgaaagggcctaccgtaccgacaacgatcatctccggatacttctctttgatagcaaggtatatcatcgtgaaacgttcttcgaagacatcggtgatcaagtcttcattgccgatgccgatatatttcagattgaaaggcttcggatgaccggattcggcacgtatcttgccccatttggtcttccttgcatcaccgttcgcccattctatcaggtcgagaatatcctgaatgtaagcacccatttcactcatcgggataccgccctgctgaccgcccctcaaatcgccatgacaggcggagttctgacaaggaacacctgccgccagtaccggaagcggttccgcacctatgtcttcgcagaactggaagtattcataataacccagtcccatgctctggtgatatccccaaaggttacgggcaggtttacgggcttccagcggtccgatagtatttttccattgatagatgttcttcaaaccgtctccatgagccacgcagcctccggggaaacggacaaagcgcgggtgcatatcggcaagtgtctgtgcaaggtcgggacgcaaaccgttctttctgcctttgaatgtattctgcgggaagagagaaatcatatccagttcaatttcacctgccgattgcgggcgaagttccagacgggtatcggcggacgttttcgctgtcagcactgctttatacgttttccacgaacgggaagagacggtaactgtcgtttcaccctgtacggtgccgtcggcatctacgaggcgtaccagtagttttccggacttgctgccttccgggatacgggcaaacaaggagaaatcatatttctcgcctgctttaagggcgattccgtcaaaaccggtgttggtcagagcggctcccggctggttcgtcttcaagacggcataatgcggattgttcggatggataggatccgaagtcgatatggtaaaggtggcgttttctccttccagcttccatgaatgggtgctgttccagttcttgtccccttcacggtcggacgggtcgtattcgaagtcccggttctggatcagttcggcatacaggccgccgtcggcggagtagttgatgtcttcgaagaagatacccatcaataaatcgctgatttcttttgtttcttccggttgtgctgtgacggtggctttgatcggtttcagtccggcaaagcgttctttatcttgtacagggcgttcgccatacagggagttacggtattggttccgttcgtacgtccgggtcagtccgtccactaccgaccagggcacttggctgacggttcccgtttcttcgtgtccggcaatctttgctttgactcttgttccttcaaaatcggaagtcgtacggggatattgctgggcttcccagtagatcaggtcttttgatctggcctgaccgtatccgtcgtggtcgttcaacttccagatacagagccattctccgccggggagttgtttcagattcggatcgagcatcttcttctgcgatccccaacggctgtaatcgcaacgaagatagccgtagttttgtcctatttcaaaccaatgtttcccgtccatgctccatgcaaagcggagtccgctacggccgtcgtcacctcgggtggcgtaagcaaaaagggatactgaatcgggagtagcagtcgtttcatgcgttgcggcaaatgcggccggctgcaacgatagtagtaatacactaaatagtagaagtaaatgtttcatggtataaattataatataagatctctgcaaaaatagagtatgtattcactaaaaaaggtctgatactctgtcatttcctgttttcccaatgacttctcagtctggcggcttcttcttttgtcaaatggatcaccgcgccgtgtttgggcgacgagaaattagtcgttttcatcactccttcgttgaaacgtcccaagttcttgaaattcacgaagtcggaagtctcgatgaaagcgaagttatgggggttgatgccgtagacgtcatacatcaatacccatttgtcttctccgatacgcttccagaggttgggagcttcgcaggccctgggttcgaagtcgtaccagcgagggtcatattcgtaatcaccgttgatgcggtctgacacggcctgtttgattccggcgcctccgtcgtgcgaaacgtagaacatgcgataccggtcgcctaccttggtgatgtcaccgtcgatagccgatattttctcgttgggatactcgaagaggatttgcgggagtgtctctatccggtcgaagtcatcattgacatagacatagtacagtttgttcgcctcgttcttgaaacgcatggtgaagtaaatcatcagtttacctttcttgtcatcgtaagtcacttcgggcgcccatacgcagccgatttcacccaaacccgccgataacaggtcgaaacgggcattggtacgtttccaattgatcaggtcccatgatttcatcagtacgagtccgcggttgtttccccacccgtattcttttccgtcacgttcccattcggtatcacggaagccgtctttctgcgcatagatgtgcaggtcggtcatggaaaggtagaaagctccgtccggtccgcggaagatgtgcgggtcacggatacctttttgcagggcgatggtatctccggcgatcaccggtttgccgtcgttcaaggcagtaaatgtatatccgtcgtcactgacggccatgtaaaggctgtgcgtttcgtctttatggaagaccatcaagtaagcacccatgtccttttcctgtgggatggcgttacggtaacggaactgacggaagccggcgctgccttttccggaggaaagcagtccgatgcgtaaagcgtagaagccgccgtagttgttatggtgcagctgagatacatccatgttttctaccagcgtagtccatttcttgccgtccttgctgactgctatccggacactgtttccctgattctgtatcttggcgaggaaacgtttgcccaacttgttagggagggtaaagctgttttccgcgtttctgtagatagtgaagttctttccgtcagacacgactccagcgtatgccttttcgctgtaatatagaagaagtccggctgtgttacccttgcctacgttgacttccacctgtgtttcgtaattcttgtcttcggcggtggccagcagtaagcgggcatcggaaggggtacttcctttcgcatctatccataaggtctgtttcttgaagctgagcgactgaggggcatattctttccagaaagtccattggagtcccggttccggtccttcgaagtcatccgagaggctgagtccgtgtttgatggacggatcggtcttgatgggagtggcggtggatttggtacgataccatccatcggcggtccattcaatcggttcgatgagggtggagcgtcccagggtgtgatagcctttggcataggcatgatatacgatccaccagttgccgttcacatcgtcgatcagtgtgccgtgtcctttcgaccaccagttgtcatgggcactataggtatgcactaccggattatagggagaattttcccacggtccggtgacactcttcgaacgggcggcaactgccatgtggcttgttgccggaccggccgttcctccctgtgcggaagtcaggtaataataaccattatggtaattcagcttcggcgattccagacacatacattccgtttcccagtgattgggatatcgccagccttcgtacactttctgtttttggccgatggtggccagtccgtcgtccgtcagtcggatgacttctcctttgtcaacatataaatatctgttcccctcctgatcggctatgtgtccggggtcgatgccactcactttcaggtcgatgggtttgctccacgggcccttgatgtcatttgcccagatcacccagtttgttcctttggccggataatagatgtagtattttcctttgtacttcaataagtcgggcgccattgcagagccttcgtattcgggcattacacggcagacgggttcccagttcatcaagtcacgggagtgccagatgaggaatccgggagcgtagtaaaaaggagaatgagtcatgtaataatcctcgccatcgcgcatgacagaagggtccggatagtcacccgataaaacgactttcgggtattcttgcgaataggcctgtactgttgcacagacaagcaaaatgaacaacaggagttttttcatggtatttatttatgggatattagatggtgcatctgatggctttacatcttgtcgggctttccgtagaccttgtacaagcgtttcagttccttgtcagtaatcggcattacggtgccgtggcgcggatggaagtccatgctaatggcattgtctatgactttgaaattctccaaatcggtgctttccgtaaactgatacttgcctttcatatatacatcgtacatcaggatgtacttgtccgtacctatcagcgggaagatgccggcaccttctacagcttctttcgtatgttgcttataatcttccgattctgtccattgtccggaagtcagggaggcggtggttgcttttttaattccattgccgtctccttccgttttatagaacaggtggtaaagtccgtctttataaatgatgtctccgtcaatacaggatttgccattcttcgggaggaacaaagttttgggttctccttctatatcggtgaaatctttgttagcgtatgcgtaataaataatgtccgggccattaccatgctgcattgaccagtagaccatgtatttcttcgcttctttatcataaatagtttgcggtgcccatacccgcttcaaatcttcctgattcgggtatttcttctggatattcacgatgttggaggtccagttgacgagatctttcgatttcaacagtaccatggcacggttggaactccatccgttgccggagaccatgtcggttacgaccatgtaaaatgtctttccgtcttcacaacgaagaatgtgcgggtcacgcactccacccgtagaactgatttcacgggaatcgatgaccggttggtttccgtttaatgcatagtagttgtatccatcggggctgacagccatccggatggcttcctcactcatcctgtttccggtgaaatagacaaacaggtaggcagactgctggctgtatcctgtcagcactcctactaaaaggagtgccaggagtaaagtatattttttcatattcatttgagagtaaatgcttatttataaaattatcaaaaggccgatattggcttattattggtttaatacttgaaatcagacggtttcacatagacgcggtattcacgaatcatgcccggaaagtccttttcggcacggggcagataacggaagcccgtcactgtttccactttgctcaggtcgattaccagttgatgggggtaagcgacattgtcaacggtcatccagaaagtggattcctgcaagtcgaatatcttatccgccgtacggtttccgctgcgtgtctcttcgctatcggcataacggattttccaatgttcgcgggatacgggtttgccgtcggctcccagcacatcgaactctgcaatagcggcaatattgttattggcttgcggagagagtgcttccagacagaagaaacgtccttttaccggagcgtcgaaacgtacttcctgccagccgttgcccggcgtgaaggctccttcgtgcgcaaccttttctcctgtcagtttcaacttttcgccatccttgcggtgtgtttccggcgctttctcgcggagtacgtcgaggatcggtttcttcagacccttgattgatgctttcgtcggacctttcaggtcgaggacgaggatttcattctcaccttctttcagccagcagcccggtatgaagagtgtctgctggggaccgatttcccagaaacgtcccatcgcatgaccgttcacccataccatacctttgccccatgtgctcatgtcgaggaaagtgtcgcctactttatcgagtttgaaagatgaccgatagtaagcaggcataatcggtaatattttcgtatccttgtagttcttgttcttgataaatgagtagtctacggggaagttatatacagtccagtttttcagttctttcacctgattgcccgaaaggagttctaccttttcggtgattcccttccggtcgtggatggacttatcaaagttgacacggcccatcgcctctaccagaatattcagttgcgtacctttcttcaaagccggcaaggtagtggtaaattctcctttgcggcgatcgaggcgggccagcagcttgccgtcggcgtagatttgtgcccagtcgtgcacttcggtgattttcaatgtagtgcctgaggttactgcttcgggcaatgtggtacggtacaggattgttccccacccttggttgaattgctccatcggctgaatatccaccgactgcttggcatccggcaagttggagaaaagtggagctactttggtaaaatgaaattcgggtacttcaatgaccggcattgcggcaggaacttccggcagtgcttcaccggcaggaagatacgttttcagcaggtcgcggaggagatagtatttctctgtcgtccatccggcttcgctgatcggggcatcgtagtcgtaagaactgcacatagcggagtaggcaggattgttggcaccaccccaatgtccgaaagtcgttcctccgtgagtcatataaaggctgaaggagatgttgcggtcgagcatttctttgatgccctgtaccatatctttggcaggacgtgtttcatgtttccgtccccagtggtcgaaccatccgctccagaactcgctgcacatcaacggagtttccggacgaagttctttcagtttcttgaattgctggtctatattggcgcctgttccgaagttgatggtccagatcaggtcgtcgagtgcattccgtgtaaagttactgctccagtcgcattggaagagaggtacatcggtaaaaccggattcgcgcaccaagtcgcgtacggcagaaacataaggcttgtcagtgccgtaagaaccgtattcgttctccacctgcaccatgataatatttccgcccttatttacctgtagcggcgccagttgcttaccgacttctttcatgaagatgcctacccgttccatataataaggatcgagcgtgcgcagtgccacatctttcttcttcagcaaccaccagggcaggccgcccatttcccattccgcacacacatacggaccggggcggacgatgacatacattccgtgtttctgagcggcacgacagaaggcagcgatatcattctgacctgtaaagtcaaacttgccttcttcctgttcgtgtatattccagaagatataaatacaaatagtgttcattcccaacgccttacacatctcaatacgatgatcccaataggcttgcggaatacgggtatagtgcagttcggcagcttttactacgaacggcttcccgtccagcaagaaagtattcttgcctgcctcaaacttacgggcagtagtctgcgcctctgcactactgaaaaagatgactgtaaaaagtactagtaaagcaataaatctgtgtctcatggcttttatctcaatatagaattataattatatatagtatacggcaaagataggcgattcacctaaaccgcaggtaccaattatcattcaaaaaaggttagaaataaagcaaaatcccctgagacagattatttttaaaggaaatacgaccttttgttgacaggttacttgtgtctgtacccgcccctccggtcgatttcctttatagtatgaatgtttttctttcttgtgttttttcttccatttagaagagttttcttctcctcagagctgtttttataatccagccccgatgaatcaattatcttcttcgtctttaaacatttgtttaattagatcaatattatcatcataatcattacccgataaagtgatgacatctgccaaacctacaatattcgaatctgaatcataagtggtcagcaaacagtacatttcacgtcctgtggcgtcttcttcaatatgaagttgtaccggttcacttcttcctccgggaaggtctgccagatattcaaagttcctggataagaaagcttccactatcttcgcagggtttgtctcatcacgcttaaacttcttgactcccatactcttgacttttcctccactttgaaagttgtatatatcaaagttattcagataggcagctatcaggcaaaccagtgtcatgatgattccggctgtacgcaccaaccagcctgccaatggaagcaaaccgggaaaaatagccagaacggctcctaccacggccaaacctaaatataacacaggtttcagattgttctttcttttttcaaatttagtcgggttggcggcataatactcgctgatgtaactgtagtacttgttgttcttttgttccataattatgtgtttttgtgattaaactatcttgatcaatttaccatttgatttgcacccaagggctcttaggattagacaacagatcgtctgccattcccttcattcctaaattgtgagcattggtccctccccagatagccctgccaataacataactcatcgccatatcgtgccatgatgtaaaagaagaatgagccagttcatacgccttgtcgatataattccacgcttccatttctgagatatatttcatatcgcagcaggcacgggcaacaaaattaattctgccggcatcccagccaatcactccatagcgggctatatcttctttagaagtaatcacttcataagctatcaactcctcatagacctctttcaaattttgcagttgcccgacagctttttcataatcttcctgactctccatgttctgctggaaaatatcgtcttgcgcattttcatcgtcaagcaaaaaagcctcataaacaaacggaaagtagtaatcgtaacctttccggcacaaatcatccaatgtttcgcgggcatcatgagcattatttattccccaccattcaccaagaatagtaggcaacttatctttgatatccaacgagagagtgttcagatatccgccttgctgcaaggcatacaatgaacctatagacagttttttatactgttctacggataattttgattttgatttaaaacgaggcccccgaaaagctcttataatagtacggacaaatggccataccttcatataaagaaaagaaaggaccattactccgcctacgacccaaggcatccaactcatgtctgtcataaatagtgtttttgttttattgttaatactaattcaatcttaattcctctgccactttgcaggacaggctgatatcattatatatgtcctcaagcagcttcccgtcattcaacgcacttggacgcacacataaaaaaccggaaggcatcacggcggcatagtagaaagtacctctgctgaacgaaagcatgatatcacatccgaaagtctggcgcagcgccgtcatatgacgcatcatcgcaggagtgagcaacatacgtgcttctacttcatcatcggcataaacggcaaaatagttctcaaactcctgatcttccagttgtaccagtcgggcactatagcgcttcttcaacccctggatattcttcgccagatatccgatcttttgttctaagtggtcgggcaatatgataatatttcctttgaatcgcttgtctatcttacaccaggcaaacataccccgaaaattgtgcggactgctatccagccgcgaggcaaacagcggacgaagcacaaaacggtagatcatgacaaaatatcccaatacaggattgtactgcaacttattcaacagcccgtaagacacaccgatatccgccacgtgcaaagagtgctcgccgtgcggaaactgaatatatccatatgtattggctgccagtgccggatcagaaaaagaggtggaaaagagtttgctgtctctcaatatccggctgtctacctgagaggaagccgagaaataaacagtaggaaacagagtagacataatgtgctgcatagcttccgactcccgttcctgaaagttagtcatacagcgggtgaaaacgaagttgaccactataaatccaatgaatacaggtattatatactgcgtgaactgcatatagttctcaagacctatataagatacaagcgcaccgccaaacaacacaaacataaaccagcagaatacaaaaagataaactgcaatacttcctgttcgtaccacctttctccagccatttacccgtaaaagctccgaacgaagctgttctgataatttcttaaaatcaattgtgtccatattcgtattatctgagaagttcggcgacatttacattctgttgttccggttcgggaatatcaatcagttcttcctgatgatgaccttgctgacgggcaacaacggaagaaggaaacatctcgatggtattattgtagtctgttactgccgcattataggtgcgccggatggcttgcagttgcagttccatgtcctcaatactgttttgcaggcgatggaattgttcattcgctttcagttcagggtaattctcgaccgacaactgtaatttggttaacagaccggacaattcattgccactttttatttgttcggcttcctgtgaaggttggaaagaatgtgatcgaagttccgtaatgcgggtaagaatttcattttcatgacccatatatgacttaacggcggccaccaaattaggtatcatgtcattccgctgctttaatgccacgcaaataccgctacgacattgcttcaccctgtttcgcttagcgatcaaattgttgactgcccaaatataccaaagtgcgattagcagtataagtcccgatccaaaatatataattcccatgcttttacttttgtgtgtatatcagttttcaatagttatatcctattcaattttgacacaggcaaaagtaaacagcatcccacaaattagcaaacaaagagggggtataaatacaggtaagcaaaaatcagataatacgttaattaataaagcattagttaggcagaagacggggtatagcagggtatatttataaaattcagagggtaatattacagtaatggtcagaagatgatgtccattttatgaccatcatctcctgaccattacttaagtctattcaaagtcagtgtctacaatccgctgaaatcgactccctcaaataccagtgaagggatacgccaggaggagttcagacgcgggtcgtttccggttgcaaccaacgagttccacaaggtaatcagattgccggtaacattcatctcggataccggttgcgtcagttttccattctcaatcaggaaaccttcgatgccataagagaaatctccggtcgaactgttgttgttaccaccattaaagcccgtaacgaggatacctttttccactccggcaatcagtccatccagattcttatctcccgtttccatgaccagaatagatgaaccgctgatagtcggatcgactcccatcttcttagcattgtaggtatcaatgaaataggtattcagtactcccttgtcaaagatggagcgacgttccgtagcaataccttcgttgtcgaaatagcgggcgccggaggctttcaccaaatgaggttcgtccgtcaaagtcagtcggtcactagctatcttttcattcaatttatttaataagaatgagtttttctgttgcaaagccgagccgttcagcgcactgatcatcggacttagcaaacggctggaattcatcggatcgaccaccatcgtatatttgccggactgtactttcttttgtcccagtttgcgtaatacacgttccagcgctttctgaccgattcctttcttaatcagatcgttcatataaagcgacgactcataccaataagcagaaggacgcgcctcgccttcccctctgatcgtgatgtcggcagaaagtgagtaccacgtacttttggtttctccttcgaaaccattgctgatcaggtggtaagcaaagtcctcgccatcgccataggaagaaccgacagagatgatccgttcgtccttgcctagtgcttcttccgctacggctttcgccatctctattttatcgtccggatttaaggatgcgaacttggcatcatatagctttaagtccggtttcccacctttatagtaacgggaagggtccgccaatacacgcgcctcatctttagccagatagcgtgtagagtctattccgtttttgataaatgtttcgagctctttccggttcaggcggttggtagagatactaccataacgtccgtccacatacagggaaaggcttaatccgccttccgatgcctgttgcaatctgtccatcttcgcatcgcgcagttcgaaagaagtgttcgaagaagagtataaaaggacttttgctgcctggcagccattcttcaaggcgtagtccatcgcccactgtgccagtttcttattttcgtctgtaatcataggttcgtctttttaaagtaagcatttacttctagttctctccaccgacagtcagtttgctaaccaaggctgaaggcataccgcaagtcaccggacaggattgtccgtcttttccgcaagtccatgtaccgttgtcgatcttcgcattggtagctaccatcgtgatatccgccaaagctttcggaccgttaccgataatattaatgtccttgatcggttgcgtcagtttaccgtcttcgatcatgtagcccgacttcacaaagaatgtaaagtctccggcaccgatctgtacctgaccgttcgtaaagttatctacaaagattcccttctttacagaagaaatgatatccgattcgctcacatttccggcttccatatatgtagcacgcatacggggtatcggcatattgcggaacgattcgcgacgtccgttgccggttggttccactccgtagtgctttgcactgatacggtcgtgcagataactagtcagtactccgtctttaatcagataagttttctgtccttcggcaccttcatcatcgaagttcaccgaaccccgattgaacggaatcgtaccgtcatccaccacgttgatatgttcgttgcagactttcttattcagctgatcggcaaatatggaaacattcttccggttgaagtccgcctcaaaagtatgtccgatagcctcgtgaagcaagatacccgatcctccggcacccatgacaacaggcatttcaccgcctttgggtttgatagccttgaacagaagagaagtctggtctaccgcttcgcgggcgattacgtccactacctcgtccgacaggaaatcgaatcctctgcggtaagcacgggcagcgtagccgttctccgtctttccgtcttcttccatgatgcacacggcacccagcgtcaccatcggacggtaatcgtagaacatcactccctccgaattgcagaagaagatatgcgaagtggtatcgctctgacttgcctgtactttatgtacccgtttgtccaaagcgaaaatccggtcgttcagtttttgcagataaggcatcttatctttcaggctgacttcctcccacggagaagcaacggtataatagttcttcttcagttccttttcggtgagattcagcggtttgttgcctttgttggcggaagcgatgcgggcggcagtacgggcagctttcagcatatcctccacagtaatattctccacgtaggcatagccactctggtctccaatcagtacacggactccgactccatagtcaatattcgaataactgttgttcactgcaccatccatcaggcggatgctgttggatatcgtgtgttcaaagaaaaggtcggcataatcgccccctttctccaatgccgcggcaagcaccttcttcaagtctgcctcgcttactccgaaatgattcatagccaaagcaactgctgctttcttgtcagctccttcgccgcccaatgcacccggggtagtcagagccatagcagaacctgtcgccaatgatccgagtagagctatacctccggtttttagaaaatttcgtctgtccatgttcacttatatttagtttcagttttcttttgtcagcagactttccagttcttcggcattcagacgaagatagaattgtccgcgataagctacagaaatagctcctgtctcttcggagacgatgatggcgtgcgcatccgatttctgcgagatgcccatagccgcacggtgacgcaagcccagttctttcgggatgttcaggtcgtgagagactggcaggatacagcctgcggctttgatccgttttttgctgataaccattgctccgtcgtgcagaggactgttcttaaaaaatatattctcaatcagacgctggctgatagccgcatctataatttctcctgtacggaccacttcatccagcggagtggtatgctcgatcacgatcaatgcgcctactttctgctttcccatgctcaggcaagccattaccaccggcatgatatcatcatgtttcaaggcttctttcctcgccccgctgaaaaaatgcgccaatgcactgacatgccgatgcgagcccagcgtcaagaggaaacgacgaatctcatcctgaaaaaggacgatcaaagcaatcacacccacattcatcaaggtatcgaatatggagcccagcagtttcatctccagaatctgagtgaccaccagccagatcaggataaaaaccagaatgccggtaaaaaccttgatagagccggaggccttcatcagtttgtaggtgtagtacaacagaagggcgaccagcagtacatcgataaaatcttttatgccaacgtcaaaaaacacggtacttattacttattacaagttattaattcacaaacgacaagagagtatcaccaacggataatgccattctatcatttgccatattcactctcagttctcagtttatccacaatccggacggcttccaccgcttcgcgcacgtcatgcacccgaagaatgttcgctcctttcattaacgcaacggtatccagtacggttgttccattcaatgaatcctgcggagttcctcccaatagtttataaatcattgatttccgggaaacaccgactaacagtggaagttcgaaaatgctgaactcttccaaatgagccatcaactcataattatgctccagtgtcttcccaaaaccaaaacccggatcgagtataatgtctttcagacccaattcacgaagttgttgcaccttgcgagcaaagtacatgaacacttccttcatcaaattatcataatggggttctttctgcatattttggggagttccctgcatgtgcatcatgatataagggactcccaggcgggccacagtctcaaacatccggttgtccatctcaccggcagcgatatcattgacgatagctacgccatactcctccacacactgttcggctacatccgcccggaaagtatcgaccgaaacgatagcatccggatgattccggtttacgatctccagtccggtacgtaagcggttcatttcttcttcggcagtgatgtgttcggcgttcgggcgcgaggagtaagctccgatatcaatgatagaggctccttcatcgatgatctgccgtgccctcgccgcaatttcctcctgcgtctgcatccggctgccggaataaaaagaatcgggtgtcacattgagaatacccatcacttgcggagtagcaagatcgagcagacgtcctttcacatttatataagttggagagatcaatttcattcttgattatattccagttagactgttgcaaatgtagataaaaaaagcaagtattcgtattaaaattaggaaataaacgtatatttgcaatcaatagcaatcaatagaactaccgaaaacgaataccatgagccgattgtcccgaattatcttaggataccttgtctcttttttgttcatcgttattcctgcaaaagcccagaaagaagctgaagtttataacgttgattcctctttgtatgcctactatcagcgttgccaggaacatttgctggaaccggtcgtgctgagtatgtccgatacgctgttccgtatggctagcggacaaaacgaccagcggatgcaggcggtagctctctccacccggctggactattattattaccaggccaataatgaagacagcatcattttttataccaataaggtaaaacaattcgctaaagaaatacagcagtccaagtactactatttcgcctgggccaaccggctgatcctatattacctgaaaaccggaagaagtaacatcgccctctatgaagccgaaaaagtgctgaaagaggcacaagccgaggacaacaagaccggactcatgtactgctacaacatcatgtcgcagatttacacaatcaagaactttgatgtcatggcgtccgaatggcgcgtgaaagaaatcgaactgaccgaaaaatacaaattagaaaactataacatcagtaatacttacgctcaacttgccaattactacattacgcatcatcagccggaaccagcgctggaagcactggaaaaagcagtaaaaacagccaactccgccagccataaaatactggcaaagctgacatacgtagagtattacagtgaatttaaagatttctcagcagcggagaagatgctgaaagaatgcagggaactgttcgaccaggacaaaaggctggactcactcaaaaaaaggttttaccgcacagaggctttctactaccagcgcagcaaacagttcgtcaaggcactggaagctgtcgagaagcagaaagccgaagagcaacggctgaatgagtacgccatgagcagcggacaataccgcctcaaaggagaaatctacagacagatgggcagaccggatgaagcggtgaaatttctgaaaaagtatattgaagtagacgattctttgaaaatagccaatgaacaactggcgagcagcgaatatgccacgctgctaaatgtagaaaagctcaatgcggagaaaaaggaattaatgcttcggacaaaagaaaaggagttgagcaataaaacgacgctgattttttcattgatcatcctgttaaccatcctcttcttgttcttatatcgggaaagccgtctgaaccggaggctgaaggcctcggaaagtgaattaagaaataagaacgaagaactgacttattcgagagaagaactgcgcaaagccagagatcaggcagaagcgaccagccagatgaaaacgacttttattcagagtatgtctcacgaaatacggacaccgctcaattcgatcataggcttctcacaagtattaagtgaccactacggcaatgaggaaacgaaagaattcgtcaacatcatcaaagccaacacggacgatctgcttcgactcgtgaccgatgtgctcgcattgtcggagctcgaccaatataacaagctccctacaaatatccaaacggatatcaatatgatctgccagctatctatcgaagtagctaaaatgcagaaacaagacacagtcgaattccttttcaaaccggaaagggaaaaactaatcatactcagcaatccggaacgcatttcgcagttacttgccaatctggcacacaatgcgatcaaattcacgactcatggcagcatcgaactgacttattcggtattggaagcagaaaagaaactcgagatcagcgttactgacaccggtataggaatccctaaggagaaacaggaaaaagtattcgaacgcttctacaaaatgaactccttctcacagggcacgggcctcggactgtcgatcagccggacgattgccgaaaagttaggaggcatcctccacatcgattcatcctatacggacgggtgccggatggtgctgactcttcctttggtatatgctgagtaaaaaacgcttctgaccgataccaaatccgaaagaatagcctatctttgcaacatttaaaaataaaagctcaggctatgaaactttctgctctttaccagatatttctggattgccaattagtgacgaccgatagtcggaactgtcctgaaggatcactgtttatcgctctgaaaggcgagtcattcaatggaaacgcttttgccggaaaagcattggaaaccggttgtgcctatgctgtcatcgatgaatccgaatacgcgattgaaggcgatcaacgatatatactcgtagacgactgcctgcaaacattgcaacagcttgccaattaccaccgccgccagctgggtacacgagtaatcggtatcactggtaccaacggcaagacgactacgaaggaactgatctccgccgtactctctcagagccacaacattctttatacgctaggtaatctgaacaaccacatcggcgtaccctctaccctgctccgcctgaaagcggaacacgaccttgccgtcatcgagatgggcgccaatcatccgggagaaatcaaattcctcagcgaaatcgtagagccggactgcggtatcatcaccaatgtaggcaaagcccatttggaaggcttcggttctttcgaaggtgtgataaaaaccaaaggagaactttatgactttctccgtaagaaagaaggttctaccgtctttatccatcacgacaatgcttatctgatgaacattgccggaggactgaacctgatcccttacggcaccgaagatgacctttacgtaaatggacgcatcaccggcaactccccttatctcactttcgaatggaaagcgggcaaggacggtgaaacctatcaggttcagacgcaactgatcggagaatacaacttccccaatgcactggctgccatcaccatcggccgcttcttcggagtgaaagatgcaaagatcaacgaagccttagccggatatacaccgcagaacaatcgttcgcaactaaagaaaacggatgataacacactgatcatcgacgcatacaacgccaacccgaccagcatgatggctgccttacagaacttccgcaacatggaagttcctcacaaaatgctcatccttggtgatatgcgcgaactgggcgccgaaagcgctaccgaacatcagaagatagcagactacctcaaagaatgcacgttcgaaaaagtatggctggtaggagatcagtttgcagcagcagagcactccttccaaacctatcccaacgtacaggaagtaataaaggaactggaagccgacaagccgaaaggatacactatcctgatcaaagggtccaacggaattaagctcagttcggttgtagattatctataatatcgctgttaatttctcaaagtattctcatgcctttgagaaaaaattctcaccacgatgagaaaaaatactcatgcctatgagaatattttctcataggcatgagtatgattatgcattactacagtcttctattcccttctcatcattcgcggacgaaccacataataagccactaaactggcaaggatggcacccaccgagttggcggcaaagtccagccagtctcctccccgataagtcgtgcaatattcttgcagcaattccacacagccgctgaacagtatgggacagaggaatgcccctacccatgcgtgccataacggtgcgtcatcacgacgatgcgcccgcagaaattccagccataacatacctgacataccaaagtacatacagatgtgaactaatttatctaagttagggatttcattcaagtccgttttaggaggtttgaagaaagacagataaatcacagttaagatgataaaaagtgaaataggatatttcttaatataagatagcatatctaaataaaattacgattccggtacaaatataactatcattttctatatttgcattttaatacgtacattttataacgatttgtaagacaaaacaagatttatgacgaaaattgatagagcgaacttcggaagtaaattaggcgtaatacttgcttccgccggctcggcagtaggattgggaaacatctggagatttccctatgaaacgggtaatcacggtggcgcagcctttatactgatctatttaggatgcgtttttcttttgggacttcccattttgattgccgaattcctaatcggacgccgttcgagggcaaatacagcgggagcctatcagaaattagctcccggcactcattggcgctgggtgggacgcatgggagtcctcgcagcttttctgattctcagttattattccgtagtggcaggatggacgctggagtatgtgtatgaagctcttacgaacggctttacgggtaagactcccacagaattcatctcttccttccagcagttctccagcagtccgtggcgaccggtcttgtggttggttctgtttctgttggttactcattttattattgtcaaaggcgtggagaaaggtatcgagaaatcttccaagatcatgatgccgactctgttcattattatattgatacttgtaatctgttcggttaccctgccgggagctggtgcgggtatcgagtttctgctgaaaccggatttcagcaaggtggacggaaatgtatttctgagtgcgatgggacaggctttcttctcccttagcctggggatgggatgtctctgcacctacgcttcttatttcagcaaagaaaccaatctgaccaagacagcattcagcgtagggattatagacacgtttgtagcagtattggcaggcttcattatctttccggccgcattctctgtagggatacaaccggacgcgggtccgagccttatctttatcacactgcccaatgtattccagcaggcattcagcggagtaccgatattggcctatatcttctccgtcatgttctacgtattgcttgccatggcagcactgacttccaccatttccctgcacgaagtggtcaccgcttatctgcacgaagaattcaacttcacacgcggcaaggcagccagactggtgaccggaggatgtatcttcttaggtatcctttgttctttgtcgctcggagtgatgaaaggattcaccatcttcggattgggaatctttgacttattcgactttgtcacggctaagatcatgctgacactcggcggtctgtgcatttccatctttaccggatggtatctcgacaagaaaatcgtctggtcggagatcaccaatgacggttcgctgaaagttcccgtatacaaactgatcatctttatattaagatatattgcaccgattgccatctctctgatctttatcaatgagttgggacttatcaaactataatgtggaaagactttttttattttactaaaaccgaacgacaaggcattatcgtccttgtcgttcttgttataggggtatacacaatccccgcaatcttgcaggctttctccggatcggagaaaaccgacccggctgaacaggcaaaatccgaaaaggaatataatgaatttatctcttccataaaagaagcaaagcaggacaagaaatatccagtttgcagaggcaagtattcatcgcccgcctatccgaaaaaagaaatcagaccggcagcgttcgatccgaataccgccgactccgccactttcctcagcctcggcttgcctccctggatggcgggcaatattctgcgataccgcagaaagcaaggcagattccgacgtccggaagactttcggaagatatacgggctgacggaagaacaataccggactcttcaaccgtatatacgcattgccgaaacaccggttcttcaagataccagccggatattagtagtacaagcgaccgcaccatatgatactttaatgaaatacccgccgggcactatcatcgaccttaatcaggcggatactaccgaacttaaaaagattccggggatcggaagccggattgcccgatcgattgtaaaccgtcgccggttattgggaggattctatcagatagagcagttaggagagattcggctaaaagcggaaaagctccgttcgtggttctccgtggatgccggaaagattcaccggatcaacatcaataaggcaagtgtagagcgaatgatgcatcatccgtacatcagctactatcaagccaagatcatcgcagagtaccggaagaagaaagggaaagtaagagacttgaaacaactgatgctttacgaggaattcacacccgcagattttgaacgaatggtgccttatgtttgttacgactagaatcgtatttgttgtgatatataaaaaaagatgcattcctatcacaccagacaagaatgcatcacacacaaacaaaacaaacactctactgacatcttcacagacttacgtagagaagcgactataaatatatagctaaaagattgaactcacacaatcttctagtgatttggtatccatttttagaagtttggtttccttattaatcttttttaattgtgccatccaccatatgtaccgttctatcggtgattttggccagtccttcatcatgggtaacgatgacgaaagtctgtcccaaccggtccctcaggtcgaagaacaattggtgtaaatcttctttattatgtgtatccagacttccggaaggttcgtccgccaggatgactgccggatgattaatcaaggcacgtgctacggctacccgttgcttctctcctcccgacagttcgttcggcttatgggaagcacggtctgtgagtcccatgaaagccagtatctccatggcacggtcgtttgcttccttagacgatactccggcgataaatgcggggatcatcacattctccaacgcggtaaactccggcagaagctgatgaaactgaaacacaaaaccgatattcttattgcggaaagcggacagttctttctccttcatccggctgactaccgttccgtcaatcgccaccgtgcccgcatccggttcgtcaagcgttcccatgatctgtaagagagtcgtttttccggctccgctaggtcctacgatactgacgatctcacctttattgatttccaggtcaatgcctttcagcacctgcaaagaaccaaaactcttggttattccttctaattttatcataatagcttcttagattcgtttaatgacatattccgccagatagcagccgaagactgccggcatatagctgaccgttccgcaggtcgatttcttattccgttcgtcatccgtgagcaataccgctttcgggtccgcctgttcggtactgaatacgacgggaagtttacgctttactcccattttctgcaaacgcttccgcaccgctttgctgagtccgcagtgataggtatcccaaagatcggcaaagcgaatctgcgtaatatcgctcttcgcgcctgcgcccatgctggaaacaatctttatatgacgcttcatcgcttcatagatcagaaagcatttggggctgatcgtatcgatggcatccactatgaagtcaaacttagcggagtccaacagttcggggatgttctcgtctttcagatagacgggtaaaacggtcagttcaatatccggattgatgtcttggtagcgtgccgccaacacttccgctttcggcatccccagggtggagtgcatggcaggaagctgacggttcatattggtaggctgcacggtatccgcgtctacaatcgtcatcctgcctaccccagcccggcaaagcatttcggcagcatacgcccccacgcctcccagcccgacaaccaatacatgcgaagcacggatacgcttcattttctcttctcccaacaggagttctgtccgttgttgccagttattttcttccatcagcttttcttaaaccatttataaaaccatttgcccaccttttcataatgctgcgattcgttgtaaccacgcgggtcggagaaagacacaatctcctgcggatcgccgaactggtcggggtacaggataatcagactgttgttggagaaatacttgctcagctgtgccggcagacgttcaaaggacggatcatacgagatagaaccccgacgggcagagatgacaacgaataaatgatcgtagttcacctgtccggtcagcagcagaaggtcgccccactcttcgagcagagaaaattcggtcggggtaccgctgaatttcttcttcaccagttgttgcagacgcatcagtgtacgttcgttggcaaagaagtgcacacggcagccgagaatgcttcccatccggcagaaatgctctacccatttggaaaaaccggtttcaaattcggctttgggcggaacggcgatgatgatgcggcggagcgtattgaccggcatcaggaatttggctatcatcacttcgcggtgagtacctttcagcaggctttcggcaaggttgccaaagaaggaatcgacgatattcgccttgcggtgcagaccgatcactacatccgtagcctcatattccttaatcgtatgtataatccccgaagcaatgttcagatcgtagcggcttaccatcgtcaccggtacatcggcggcagcggcaatcatggcggctttttcgagattccgcttgccttgcagttccttattctccgagctgttattgtcattaatcacattcagggcaatcatgccattcttctgcttggcatccttgatcaccagggcgagattcaccaggttctcaatcgtttccggattagctaccggaatcagaatctgctccatcgctttcttcgctcccttatcttcgggctgcgcatcttcgttcagtgcaaaccggcgggcggaacgttccgttaccagcgaactgatgacacaggtgaaaaggatcatcacgaccgtaccgttcagtacgtcatcattgagcagacgctctccgttttccatgataatttcgtgcccgatcagcaccgctgccagcgtagccgccgcctgtgcattactgagtccgaagatcatgctgcgttcattgggctgcatacggtaaatcttctgcgtgatccatgcggcaagccatttactgaaagtagctaccactgtcatgactaccgccactttcaatgcttcgccccccgtaaacaggcttctgacatcgataatcataccgacaccgatcagaaagtaaggaatgaacaaggcatttcccacaaattccagacggttcatcagcggagagacatgaggaatcaagcggttcaggaccaatccggcaaggaaagctcccaaaattccttccattcctacaaactccatcagtccgcctccgaggaagaccatcgccagcacgaacacgaactgcatcacgctatcgtcatacttccggaagaaccagcgtccgatgcgggggaagaagaagataataaggaaaccaaggaaggctactttcgcaacgaggaacacccagaacagaccatcgacggtgcctttaaacattccgccaataacggcaaggatgataagggcaagagtgaccgtaatggccgtaccaccgatagtaatattgacactgcgcagacgggataatccgtaacggctgataataggataagcaatcaaagtgtgagaagcgtacatactggcgagcagcactgcggtaagaaaaccgtatcccagcatgctcatactgctccatatacccagcgccataggaatcaggaaagtaagcaagccgaagacaacgctcttcatccggtttttcttgaagtcctccatgtccatttcgagtccggcaaggaacatgatatagtaaagccccactttaccaaacagttcgaagctgctgtcacggtcgagcacatggaatccgtgttcgccgatcagcacaccggccagaatcataccgataatatgaggtatatgaaggcgccccagaatcatcggagcaaagagaatgataattagcaccagaaaaaacacccaagtcggatcggttatcggtaacgctaaattgaattcaaacaggttcataggtccgtggttttaggatttctacgcaaaggaacaaaaaagttcgcagaatcacaatgcaggtattataaatctcatcctcctgtttatttaataggaataatagcaacaattgcagaaggatagttgttggagataaaaagaaaacttaactttgcatccatcccaataaaatgaacgcattatggcaaaaggaatcccatacggcatatcggacttcagcaggctgatagaccaaaattattattatgtagataaaacgcatttcattccccagatagaagaaatagcaaactaccttttccttattcgtccccgacggttcggcaagagtgtatttctcaccatgatgcgtgcctattacgatatttcacagaaagatcgttttgaagaacggttcggcaatctatggatcggtaagcaccccaccccgcttcagggaatctaccaggtgctctattttgacttttccaaagcaaacctgggacgtggaagtctggaagacaacttcaacaattattgctgcatacagttgaacgacttcttcagtacttaccgggaatactaccaaggcgagaaagaactggagcaaatcatcgcttctaccgaagccgctacaaagctgcattggctggaagccaccgcccgccgcctgggacatttgctctacctcatcattgatgaatatgacaactttacgaatgtcatcctgagtgaacaggggaaaaaccttttccgcgacctgacccacgccagcggcttctaccgagaatacttcaagcagttcaagggtatgttcgaacgcatcttcctgatgggggtaagtcctgttacgctggacgacttatccagcggatataacatagactggaatatcagtgtggacccacatttcaatatgatgatgggattcagcgaaacggatgtacgggagatgttcggctattatcagaaagaaggtatgctgaaaggagatatagatgccatgattaatgaaatgaaaccgtggtatgacaattactgctttgcagaagccagtttgaagaccgatccgagaatgttcaattgcgacatgacgctatattatttgcgtcaccgggttaatttcgacgcctcccctaaggaattgatcgacaagaatatccgtacggactacagcaagctgaaaatgttggcacgcctcgaccatgagaatgtgtcgggggaagaccgcatgagtacgattgaagagatagctgctaaaggagagatactggtaaacctccacacctccttcccggcagagaagattgttgaaacagacaatttccgcagcctgctttattattatggactgcttacaatgtgtggcacacgtggagaccgtattgtgatgtgcattcctaacaattgcgtccgtgagcagtatttcggattccttcgggaatactaccagcagcgtaaggaagtattcttgcctcacttaaaagatttaattgacgacatggccttcgacggacaatggcgccctctgtttgagtacatagcccttgcctataaagaaaactccgccatccgcgatgccatcgagggagaacacaatttgcaaggtttcttcaaagcataccttgctcttgcttcttattatctggttcagccggaattggagatgaattacggatattgtgactttttcctcctgccggacaaatcccgctacccggacacggcacacagttatattctggaattaaaatacctcccgcgcaccgccaccgataaggaactggaagaacaagcggaagaaggcagagggcaactaaaacaatatagccgggataaaaaggtaacaactatcagtgaagggactgcattgcattgcattttgctccaatttaaaggatgggaactgataaaatgtgaagaagtatctccaaaatgctgattatatgataaaatgttctaattttgcagcgattaaccacattattcacatttaacaaaagaaaaagatgaaagtagctattgttggcgtaagcggagccgtaggacaggaattcctgcgcgtgctcgatgagagaaatttcccgatggacgagttagttttgttcggttctaaacgcagtgccggaacaacctatactttccgcggtaaacagatcgaggtcaaactcttacaacacaacgatgactttaaaggagtagacattgctttcacttctgccggtgcaggaacatccaaggagttcgagaaaacaatcaccaaatacggtgctgtgatgatcgacaactccagcgctttccgtatggacgctgatgtgcctttggtagtgcccgaagtaaatgccgcagatgcgttggagcgtccgcgtggcgtcattgccaatcctaactgtacaactatccagatggtagttgcactgaaagccatcgaacagctttctcatataaaaaccgtgcacgtatctacttatcaggctgccagcggtgccggtgctgccgctatggacgagttgtacgaacaataccgtcaggtattggccaacgagcctgtgacagtagagaagtttgcttatcagctggcattcaacctgattccgcagatcgacgtgttcacggaaaacggttataccaaagaagaaatgaagatgtataacgaaacacgcaagattatgcactctgacgtgaaagtcagtgcaacctgcgtacgtgttcccgcacttcgtgctcactctgaaagcatctgggtggaaacagaacgtccgatctcggtagaagaagcccgtgaagcattcgccaaaggcgagggtctcgttcttcaggacaatcctgctgaaaaggaatacccgatgccgttgttccttgcaggcaaagaccctgtgtacgttggacgtatccgcaaagaccttacaaatgaaaacggtctgacattctggatcgttggcgatcagatcaaaaaaggtgctgcactgaatgctgtacagatcgctgagtatctgatcaaggtaaagaacgtataagatacatagataaaatgaaataaaggtcggcttgctacacgacaatcgtcgcagtgcaagccgatcttctttatttgcctcgaagtcaccaaggctttccttttcccatctctcctacaagattattctccaagaagtagttccaaattcggtttcatgccttgaaacaaaaggtttcatgccttggaactaatagtttcaacctttgaaaccattggtttcaagcaatgaaactaaaagtttcaagcgcctgaaactatcagaaacaactgtcgattgaaatgacttgaccgtaacaactgactcatttaacctgtcctttcaagccatttcaaaccatttatcagtctataatgaaggagttgtcagctattaacaactgatttctcagttattaatagctgggatgccaattgttaacagttgacacatcagacattaacatcctgcaaatcaaagcataaagctaaacaaacgagattaagtccatgatgcaagtgagagcaaccgtttgccctcatacctgccgccacagttgctaccacactggaaaccacgatgaataaagggatacagaccgtttgttagagcatgagagcaaaactgctatcaaatcactatggagagaaatacctatttatgggtactcgcatactcccaaaatagtcattatttgcgattgtagtattaacgatatagaacgaaatttgcacaaaatttgttctatgaggtttcttacacttaaaataatgctctgcttgcttctttctttgatcatttccagaattgaagccaatactaacaattattctatttccggtcgtatatccgacgaaaggacgggttcgccgttgcccggcgcatccattttaatcaaaggcacctatttgtgggctgtatccgaccagaagggggaatttacgatacaaggaatacaggaaggcaagtatcaattggaagtttccttcctcggttatgttccggcaacggttccggtgaatgtgaacaacagcatcaaaggattaaagatacaactgaaggaaaatacacttgccctgaacgacgtaatcgttaccgcacaagctccgaagactgaactgaacaccacgctcaacatcgggagtaacgcactggaacatctgcagatatcgaatgtaagcgatatttccgcccttcttccgggaggaaagacgaaagtcccggacttgaccagcaacaatattttctctctgcgcgacggaggttcatccgcaggcaacgcggctttcggaacggcgatagaagtagacggagtacgcatcggcaacaactcttctttcggcaatatgaccggaatagatacccgcagcatctctgtggccgatatcgaatcggtagaagtcatcaccggagtaccttcggcagagtacggagacttgaacagcggtatggtcaaaatccatacgaagaaagggaagactccgtggaatgtactgctatccatcaatccccgcacagaacaggtgtccttttccaaagggctggacctcggcaacgataaaggaatcgtcaacataagcggtgaatggatcaaggctactcaaaagcttaattcaccctatacttcttatacccgcagaggattctccgcaggttacagcaatacgttccggaaagtgctccgattcgacatcgggctgaccggtaacatcggaggaatgaatacgaaggatgatcccgacgcatatacgggagaatataccaaagtcagagacaacgttttccgtgcaaacacgtcattggcatggctgctcaacaagtcatggattaccaacctcaaactggatgcatcggtgtattacaatgataacaagtcgcatgcacatacaccttattcttatgcatccgaacagccggcagtccacgctgaacaggaaggttatttcattgcaggcaaactgccttaccatttctttgccgatcagattgtcgattccaaagaactggattatgccgcttcgttgaagtacgaatggaaccgtcgtttcaagaacgttaccagcaatctgaaagcaggcgtgcaatggaaaggaacaggcaatgtgggcgacggagagtattatcagaatccttcgctggctcccaacggatatcgcccccgttcttactcggcttatccgtatatgcacaatgtttcgttgtatgcggaagaaagcctgtcggtagctgtcggcagcaccatgctgaggctgatggcgggattgcgttgggagaatctgttcatcagcggaacgcaatacgacaagctgaacacactgtcgccacgtttcaacgccagatggcagctgaacgaaaacatagcgattcggggcggatggggagtgaccgagaagctgccttcgtactatgtactctatccccgacaggagtatcgggatattcagactttcggagtctcatacaataacaatgagtcggcttacgtctattacagtcagccatatactttattacacaatgagaaactccgctggcagaagaatcagaatgccgaaataggagttgacatcaatgtagcccgcacccgtatttcactggtaggatactttaaccgtacgaagatgccttataaatatacaagtacctatactccgttcgcatacaatgttctacagttgccggaaggattcgagctgtccgccaatccgcagattaccgtagacaatcagacgggcatgggatatatacgggacgatgagaacagttactggacaccgctggacgtaaaggtgaaagaccagactttcgtcaggtcaacctctcccgataacggaccggacatcacccgcagaggagcggaaatgatcatcgattttccggagatcactcctctccgtacgcagttccgtgtggatgcggcctatacatatagcaaatacatagacaattccttgtcttattactaccaaaacggatggtcgcacaccactctcgccaaccgttcctaccaatatgtaggtatatatgccaacggcgacaactcatccacgaccgccaacggcaagcgcactcactcgctggatgccaatatcacagcgatcacccgtatcccgaaagcaaggctgatcatatcctgcaaactggaagcctcgctcatcaagcggtcgcagaatctctccgaatataacggtacgtcctacgcgttcaacgtcagcgagaacagcaacgagaaaacaggaggcagcatctacgacggaaattcttatacggccatttatccggttgcctacctcgacctgaacaacgaggtacatccgttcaccgccgccgaagccgaaaatccggacttcgcgcatctgatacgtaaatcgggcaatgcctatactttcgcagccgacggatatgatccgtatttctctgccaatatcagcattaccaaggagataggcgatcatgtttcgctgtcgttcaacgcgattaatttcacgaactcacgggcgtatgtgaaatcatacgcaaccggaaccagtgcaatctttaccccgaacttttattatggactaacctgccgcattaaactttagaaatatgaaacaacagtcaatctatatcatactgcttttcgtcacatccttactcggaggatgtacagacctcgacaaaggcaatccttacgaagaccagctgcacaccttgcaggtgactgccgtctatccggacgattatgcggaataccttcgggaaggcatcaccgtccaaatcgaagacatcgcccgcggcaactcctacaagacggtaaccgaccagaacggtacagcgcaattcgccctgaccaacggcatataccgcatacaaatcagcgataaagccgatcagcatatatttaacggactggcagacaaggtaaaactcgtaaacggagatatcacactcaacgttccgcttacacactccaaagccggtgccatcattatcaaggaaatctattgcggaggatgtaccaagctgccgcaggaaggtacttatcaggctgataaatacattatcctgcacaacaatgattcccagacgcagtatctcgaccatttgtgtttaggtacgctcgatccttacaactcccagtccaccaacgtatgggtgacgcaggacgaagcaaccggagcaaccattttccccgatttcgctcctatcgtccagtgcatctggcaattcggcggtaacggcacttccttcccgctggcacccggtgcagatgcagtcatcgccgtcaacggcgccatagatcatgccgcccaatacccgctgtcggtcaatctgaacaaaccgggatattttgcctgctacaacaatgtttattactggaatacgatgtatcatcctgctccgggagaccagatcagccgcgaccattatctggacgtggtcatcaaactgggacaggcgaatgcctatacattctccatattttctcccgccactgtcatcttcaaggctcaggacactacgatacaggagtatgtacagcaaacaggcagtgtgatacaaaagcccggcagcacggtggatcaggtcatcaagattccgctcgactgggtgattgacggggtagaggtgtactatggcggttcgtcgagcaataaaaaacgcatttcgccttccatcgatgccggatatgtcagccaaagcgcactgtatgacggacgcagcctgcaccgtcgggtagacgaggaagcatcgaaggaggccggttatgaaatactggaagatacgaacaactcttccgccgatttttatgaaagagaacaacaatccctgcatgagtaatatgaaaggaatatatataggatgtatgctgttgtgtatagcagccgtaagctcggcacagacttacgatgttatcgaacgacgaaattcatggaataccggaacaaacgtaacgggaatcatgatggacagcgtcaccgtctcctacaccgagctgtacggcaagaacaatcacggtgacttccgcaactactacgaagccggtaaattatggagtgccggtgcagtagccaagtccatcacacacttaaagaagtattctctgatcggctcgttctcattcgaccacacttccggcaaggatatgagcggctccatgttcattcatcccggattttatccggtagacctgctggagtttacccccggccgaaaggatttgcaaacttatgcgtttatgggaggtatagcagcagatgccggcaccaactggcgcatcggcggaaagatcgatttcacctctgccaattactccaaacgcaaggacttgcggcataccaactacagactggacttaaaagtcgctcccggcatcatgtatcattcggaccattatgcgatcggattctcttatattttcagcaaaaacagcgaatccgtttcagcagaagagatcggaacagccgctacaccttattacgcattccttgataaaggactgatgtacggtgcctacgaagcatggtcgggaagcggagtccatctgagcgaatcgggtatcaacggattccccatcaaggaactgtctcacggagcagcagttcaggctcaatggggatcgctttacggagatgtggagtatctgcattcttccggtaccgccggagagaaagaggttatctggtttaagtttccggcacaccggattacatcgcatctgagataccgtttcgccaaaggtagtaccgaacatttcctgcggatcaacctctcatggtcacgccagacaaatgacgagaatgtattgggacaggagatatccaacggaatcacgactacccatgtttacggttccaaccggattttcgaaagaaaggctttatccgttcagcccgaatatgagttgatcgctcctaaaggagaattgcgtgtcggagccgagatttcgtcttttaaaagcatgactacccaaatgtacccttatgtcgcgtcacagacaatgacttgtggacgggtttacgcatccggcgtacttcatgccggaagattcgatgtgaaagctgccgcaagtttatccataggagacttcacggagaagagcaggactactgaaacgacagccgaaccgggcgatcctccataccgcctgacagattattaccatctgcagaatgagtatgcaactgccccacgggcgacagtgaacgtcggattacgctatcactttcatcgggggatttatgccgaaattcagggcggatatacgcacggtttcaaccttgaatatatagcaggttcgagccgttggaatgagacgattaagttaggttatacattttaaaattattcatttacataatataaaactatcaaatgatgaaaaaggggatattatttgtgctgacagcagcatttctggcatcttgccagcaggaggaaaacgagggagtagcatctgtggaccgggtgaccatcactcctattatcacacgtgccacagaggttaatttcgaagatcaggatcagatcggattgagtgtcactaaagaagacggcactgtatatgccaccaacgagcttatgactttcaatgacggagctttcgccggaagtctgaaatggtatcccgaaggagcagacaagtcttcattcgtggcttactatccttacagcgcaaccggtgtaccgacttcattcaccgtgcatgccgaccagaccaccaactacggaatctccgactttatggcggcaagcaaatccgacgtacttccttcggtgaactccatcagcatgatcttcaagcacatgctgaccaaactggttattaatgtgacaaacgaaacgaatttggatatttcatctatagtgctcaaaggctctgttcctactgccaatatcaatttggcaaccatgaagacaaccgtaaacgagagcgccgccgccacagacatcacagcacaacaagtgacaaagaataagacttttcgtgccattgtagtcccacagacggctgcgttcactcttgcagtaacaacttcagataacaatacattgatgcaaaagctcgtatccacagatttagttcaaggcggacaatacagtgtcaatatacgtgtattacccgataatatcatcgttacactcagtggtgaaatcgagaactggacagacgagggagagatcaagggagatgagccggaagttccttttgaagagcatgacggatatttcatctatgacggcatcacctacaatacggtaactctctccaacggaacaacatggatggcggaaccattacgctatgtaccggatggatatactccgtcaagtgatccggctgcagattctcacatctggtatccgtacgaattggttacagttgacggtacacttactgcaaaagcattgcaggacgcaacttctatcaagcagtacggttatctctacgacatccatgccgcacttagcggcaaagcagttactccggaaaactgctacgactttgaaggagcacagggcatctgtccgaagggatggcacatcccgactcgcgccgaatatttcagccttgtaggtaattcgaccaaagatgcggacggcaatagtttggaaaacggaaaagacgctcttttctatgacacagcatatgacggtggtaaaatcccgacactcaacgaggctaaatttaattatcaattctcgggagtacgtatgtcaaccggttattcagccgtccccaaatatcaggcaacggcaataaccagcagcaacagtacggtaaccgaatggtttggaaaacccagtatgagttattacatgacttcaactgcatataagcctatttatagtacaagcaccggcgacctgaccaatattcagttcttcggactaatgagcacattctcaatggcgaagtatccggaaggcagattgtctctgagttatatcagtgtacttagtggtcaaacagttcgttgtgtaaagaaccagaactaaaagccatttgcaagttcataaaaaagaatataaactacataaaaacaaaaagtaacaatgaaaacaaaaaagctaagcatcgcaatcgctctactggcggttgccgttatcggaacctcttgtggaaacaaacagcagaaaagttcctcggacacaacaacagaacagaccacttcgtctgctttagaaattgactctcttcttgcaaatgcagaaaaccttgcaggaaaagaagtaaccatcgaaggcgtttgcacacatacctgcaagcatggcgccaagaaaatcttcctgatgggcagtgacgacacacaagtgatccgcgtagaagccggcaccttgggagcattcgacccgaaatgtgtgaactccatcgtccgcgtcaccggaacactgaaagaacaacgcattgacgaagcctacctccaaaactgggaagcacaactcaaagcgcaagctgccgaaaaacacggaaccggtgaagccggctgtgacacagagaagaaagcacgcggcgagacagccaacacgcccgaagcccgtatcgccgacttccgcgcgaagatagccgaccgaaaagcaagcagcggcaaagagtatctgtctttctatttcatggaagctaattcgtatgaagtggagtagcagcatccgtaaatggagtaggctgatacaccgtgatttatcctttttctttgccggaatggtcttgatttatgccatttccggcattgtgatgaatcaccgtgacaccatcaacccgaacttctccatcgaacggaaagaatataagattgccgaaaaactgccgggcaaagagggaatgaaaagggaaaatgtactgactctgctgcaaccattgggagaggaaggtaactataccaagcactatttcccgaaagcggacatcatgaaagtgttcttgaaaggcgggtccaacttgcaggtaaacgtccgtacgggagaggcagtctacgaatctgtcacccgccgcccgctcatcggagcaatggcacgcctgcactacaaccccggacaatggtggacttactttgcggatattttcgcagtcggcctcatcatcatcaccctttccggagtcatcatgctgaaaggcaacaaaggtattatcggcagaggaggaatagaaatgattgtcggaatcgtgattcccatcctttttcttctcttcttttgaacagaataactgataaaataaaatggaacaaatcatagaatgtaacaacctgacgcactactacggcaaacggttgatttacgaaaatcttagtttcacagtccccaaaggccgcatcctcggactactgggcaagaatggtacgggcaagaccacgaccatcaacatcctgagcggatatctgaaaccacgttccggagaatgccgtatcttcggacaagagatacagacgatggctccggcattgcgccgcaacatcgggctgctgatagaagggcacgtacagtatcaattcatgagcatcacccagattgagaagttctacgcagccttttaccccaatcaatggaaaaaagaggcttattatgaactgatgaacaaactgaaagtagctaccggacagcgcatctcccgtatgtcttgcggacaacgttcacaagtagcactcggactgattctggcacagaatcccgagcttcttgtattagacgacttctccctcggtctcgaccccggttatcgccgcctgtttgtagactatctccgcgattatgcacgttccgaaggcaagactgtctttctgacttcgcatatcattcaggatatggaacgactggtagacgactgtatcataatggactacggaaagatactgattcagaagccaattgacgaattactgaaagaaggacgccgctatacctgtactgttcccgaaggttacgaactgcccgcatccgatgatttctatcatccttccgtgatgcggaatacactggaaacattctccttcctccccctcacagaggcggaagcaaaactgaaatccatgtcagtaccctatacggacctgcatagcgaacatgtgaatctggaagatgccttcatcggtctgaccggcaaatactgattcaataaaataattaaagattaaaaagtaaattagaagtctcatgtacgctatattttataaagaatggatcaagacacggtggtattttctgcttgccgtagtcactacactcggttttacaggctactgtatgcttcgcatcaaccgggtgatagaaatgaaaggcgccgcgcatgtatgggaagtcatgatgcagcgggatgccatattcatcgatatgttacaatacatccccctgattgccggagtgctgatggccatcgtgcagtttgttcccgagatgcagcgcaaatgtctgaaactgactttgcacctgccctatcccgaactgaaaatgaccggcaatatgttgttctccggtttggtactgttgcttgtctgcttcgcttccaacttccttctgatggaggtctatctgagcggagtactggctcacgaactgaagaatcatatactgctgaccgccctcacgtggtatcttgccggtatttccggctacctgctcatcgcatggatctgcctcgaaccggcatggaaacgcagaatcatcaatctcattatcgccgtattgttactgcgaatcttcttcctgtcgcccacgccggaagcttataacaaattcctcccgtatctgctggtctatacgttgctgaccgcgtctttctcctggctctccatcgtacggttcaaagcgggaaagcaggactaggataatgaagaataaagaactaaaaatgaagaattaaataaagatgaaacgtttcagtaccctactattatatgtcaccatcgccttcctgcttctctggcagttgccttggtgttacaacttctttgtcgtaaagccggagaagacttctttcactctatatagtttcgtgatcggcgatttcgccttgatgggacaggaagagggaaaaggaaccgtacgtcgcgacgctgccggaaacatttattccgaagcagctttcgacagtattctgcctatgttttatttccgccagttgatgtccgacgaacgttttccggatacgattaacgggatagctgtcactccgaagatcgtgcagacggagaatttcaatttccgcagcgtacctacggatatcaacgctccttccatcggtctttatcctctgttggagtcgatgtccgggcgtgtagacctgaagatgccggatgatgttttccgcattacttcgcaaggcattgagtttatcgatatggcttccaatagcgtgaatgcagaaaaaagcctcttgtttacagaagctatgaccaagaaggatttccgctttccggccattgagatcgcaggaaacccgacggtgaagaaggagtatgacgaaggataccttctgttggatgccgaccgtcgtctgttccatctgaaacaggtgaaagggcgtccctacgttcgtgctatcactttgccggaaggattaacattagagcacctttatctgacggaattcagaaataaaaagacgcttgctttcctgacagatatcaacaatgctttatatgtgctgaaaagccgcacgtatgatgtggtgaaaacaggagttcctgcattcaatcccgaaacggacgcgctgaccatcattggaaatatgttcgactggacggtacgggtgacgagtccgtcttccgataattactatgctttgaacgcggatgattattcactgataaagaagctggaaaataattcgaatactcattatatgcccggcatcagtttcacttcttatacggacaagtatgtgatgccgcgctttgagtaataacaggaataataacttttaggcacggattacacagattaacacggttttagcgttgtgaaagcataaagctatcgtgttaattcgtataatccgtatcttttatttctaacattcacagaaaacaataaagaacctttcgcatttattcaacaagaaactgtacctttgcaagcatgaacattatccgatccgcaattgcctctgcgttgaacacaaacaaatacggtagataacaacactaatttaaagccgtatgaaaatttgcaaggcatgtacatttctgagtttcctcattatattattatacagttgtgcgcttccgcctgaggatgaaaaagagagccttgaaccggacagttcaacatcagaacttccctggacaggagaaaccgagaaattcacgattaataccaaagaaggcgtacacttgaatgatccgcaggaagatgcaggaacagcatatatcacgatcccctcttcttctgtaagaagcacccgatgggaattaggggtacggctcacctttaatccttccgccaataattacgcccgtttctatttagcctcttcatcggaaatactttccggagatctgaacggctattacattcagataggaggaacaaaagacaatgtagcactttaccggcaaaatgggaatcaatccaaattactggcttcgggaagagaactcatgaaaggaaataattctccgaaattatttatcaaagtagaatgcgacgccaacggctactggactttctggacacgcatggaatcggaaaccgaatatacgaaggagaaacaaataaaagacgcaagtatcacaaagtcaatctgctgcggcatatactgcgtttatacaaaaagccgctgtgacggtttcactttccatcatatacagttgtctgatgatgtgataacaagtactgaaccggacgacataccggacgttccggatgaaccggacaagcctgacacaccggaatcgccggaatatcctgacaatgtgagaaatatgttactattcaacgaagtgatgtatgacaatgccaaagacggtgccgaatacatcgaattctataatcctgctgatcaggatatcactgtaaagtctctgcgtctgtttaaaatgagagcaacgggagaaatattcagtaccacaatactcaaacaggaagatgaaaatacaaaccttgttattcccggcaaaggatatatttgttttactcactccgcaactacactgatcagaaagcataaggttgacggcaaaagtataaccgaaatatccaaatttccgcaactgagcaacgacggaggttaccttgccttggcaactgatgaagaacatccccgcacgattgatacctgccgtttcatagactggatgcacgacacttcagtcactacaggcatttcattagagaagatatctcctgaacttccttctctcaacaaaaactggcactcatcgagaaatgatacaggtggcacacccggaataaaaaactcataagaaggatgcatttatttgataaattccctacatttgtacaatttgtaggaaaagcatatttgaatatattcacccgcgaacgaattttaagcaacagatatgagtccaattatcttatctattactatcatagcatactttatgatccttttcgctatctcctatatagcaggacataaagcggataacgaaggcttcttcgtcggcaaccgcaaatcggcatggtatattgtcgcctttgccatgattggttccactatctccggagttacgtttgtatccgtaccgggtatggtacaagccagcggcttctcctacctgcaaatggtactgggatttatcgtcggacagttcattatcgcattcatactcgttccgcttttctaccggatgaatctggtttctatctatgaatatcttgaaaatcgcttcggagcttcttcctataagacaggagcctggtttttctttatttccaaaatgctcggagctgccgtgcggctctttttagtatgtctgaccttgcaattactcatcttcgaccctttccatattccctttataatcaatgtcatactgacagtactcattgtctggctctatactttccggggaggagtgaaatcattgatatggactgatgtactgaaaacattctgtctggtagtctccgttgtactttgtatctactatatagcttccagcctgcatctgaatttcagcggattggtctcaacgatttcagacagcgatctctccaaaatgttcttttttgacgatgtcaacgacaagcgatatttcttcaagcaattcctggcaggcgtctttaccgttatcgccatgaacgggctggatcaggatatgatgcaacggaatctcagttgcaagaacttccgtgactcacagaagaatatgattacaagcgggatttcacagttcttcgtgatcctgctcttcctgatgctgggtgtattgctctatactttcaccgcccgacagggaatcgagaatcccggcaagagcgatgaattgttcccaatgatcgccacaggcaattactttccgggaatagtcggtatcctgttcattatcggattgatagcttcggcgtactccgctgccggatcggccttgatagccctgacgacttctttcaccgtagatattctgaatgcgcacaagaaagacgaagcggcactctgcaaaatacggaaacacgtgcacatcgggatggcgttcgtgatgggaatcgtcatcttcgtattcaatttgctgaataatacaagtgtgattgatgcgatttatacgctggccagctatacgtatggtccaattctcggactattcgctttcggcatttttactaaaaaacaagtttatgatccatatattccgttagtagccattctttctcctgcactttgctacgtattgcaaagaaattcggaagcctggttcgatggatatcaaattagctacgagttactgatattgaatgccgcgtttacttttctggggctttgcctgctcatcaaaaggaaatcgtcagccgcccctatcaacagctctttaataaaaaaacattaaaatgaaaaagaaaatcaattgcttcataccttttggcaatccgaaagatacgatacaaactgtaaaagaattgcaagcttcagaattagtgaacaaaatctacctgctaagcgctgataccaacaaagagtgcttaccggggtgtgaatgtctcctcattaacggtctctactctacaagtacgattaaaacaattgctgacaacgcagatgatgccagctatcttttgctttacacgaaacagaccccgctaaaactaggattgtacgcactggaacgcatgacacagattatacagagttcctcagaaaatgcaatggtatacgcagatcattaccaactggttgacggagttctcaaacaaactcccgttattgattatcaacaaggaagcctccgggatgattttgatttcggttcggtgcttttattcaattccgaaattttcacccttgcttcaagtattctggaggaaacagttttccaatatgctgcattttatgaaatgcgtctgatgctaggtaatctatttcaaatcatccatatcaatgagttcctttacacagaaatagaaacagatacccggaaaagcggagaaaaacaattcgactacgtaaatcctaaaaatcgggaagtacagatcgaaatggagaaagtttgtatcaagcatctgaaagaaatcaatgcctatgtaagaccttcttcccgaacagtaaacctggacagagaagcttttgagtttgaagcatctgtcatcatacctgtccgtaatcgtatccggaccattcgtgacgccgtaaattctgctttgagccagcaaacgacttttccctttaatgtgattgtgatcgacaatcactcaacggacggtaccaccgaagccctccagaaatttagtgcggacaatagactaatacatatcattccccaggagaatgatctcggtataggaggttgctggaatgtaggagtacaccatgagaaatgcggtaaatttgccgtgcaactggatagcgatgacctgtataaggatgagcataccttacagaaaatcgtcgataccttctatcagcagaactgtgcaatggtgatagggacttacctaatgacggattttcagatgaacgagatagctcccggtgtcattgaccataaagagtggacagtagaggacggtcccaacaatgctttacgtatcaatgggttgggtgccccacgggccttctacactcccatccttcgcaagatcaaattccccaataccagttatggagaagattatgccataggtctgagtatttctcgtgaatatacgatcggtcgtatttatgatgtaatctatctttgccgccgttgggaaggcaactctgacgcagcattagatatcgaaaaaattaaccggaacaatttctacaaagacagtatccgaacctgggagttacaggcaagaatccggatgcacagcatcgatgaaagttttcagcgtctcgtcaacgagatgatagaaaaacagaaaaaagactggaagctggcaaaaaagaattataaggaattagaacagaatcttaaaaaagaaaagacgctggaactcaaactaggaggggacaccaagagagtcagattcttcccaaatccacaacgggcaatctctacaatggcccagaccgactctcagtccatacaagaaagaccttgttttctgtgcaatgacaatcgcccggcagaacaaacgtctttgtcactcggacattatgagatatgcctcaatccctatccgattttccgccggcatctgactataattgaagaggaacataccccgcaaaccatcaaaaaccgttttgaggatatgcttttccttgccgaaaacatgaacgagttcctcatcttatataacggaccggaatgcggagcttccgcccctgaccatatgcactttcaggcagcaggaaaagaggaaaagattgccaatccttttgggatgactttcatatcggacatgcttagttctgaagatagcgtacatagtcatctagaaaacgggttcaccacgagcattggcatttcatctccaaacagaagagggatcattgaaatgtttgagtatctttacgataagatagtttctatttatcatgacaaagaacctttaatcaatgtgattgcctggtatggactcgaaacagtaaaccgcactggaggcgatgaaataaaacagtggaactgtattattttcctacgttctaaacatcggccggaatgttattatgcccaagggaaaaaaggcttattgataagcccggctattgcggagatgtgtggcgtattccccattgtaagagaagaagatttggataagataacagctaaaaaaatcactcagatttacaaggaggtcagtttgtcacaggaacagttaaaagcactcaccgatcaaacatcctagtaaagaagaaatggaagaacctcagattacagtcggtatcctttcgggaaaagaaattgaattttcttttcccgaaagcttcactactcctgacggcacaaaggtttcaggggcacaaaaggctgtttatcaaaaagaaaagatatactggtcagggaaagaatacgatgaattgatattctaccctcagccaaatgccgggatcttctttgagctaaaggatgtcaccatcggcatcaattttcattgggaacgcaaagaagtacaacgcttccagggagctttgaaaatcattgtcgaaggagagacactgaccgccatcaatgtaatctctatagaagattacctgacaagtgtcatctcatcagaaatgagtgccaccgcctctttggaactactgaaagcgcatgcagtcatttccagaagctggctgatcaataaattgagagtggagaatgaaaaatggaaagctactatacagccggacagcgcagccaactctccacattccactctccactctcaacttatcaaatggtatgatcatgaagcgcatacgcactttgatgtttgtgcggatgatcattgccagcgctatcagggaattacccgtgcttctactccacaagctatcgaagctgtttcagctacccgtggagaggtgctgatgtatgaaggaaagatttgcgatgcgcgattctccaaatgttgtggcggtgcaatggaagagtttcagaattgttgggagaatgtgaggcatccttatctgaccggtaaacgagattacataccggaatcccatgcttctgattcggagaaacaaataacaggtccggcaatacagcttcccgatctgacgcaggaagaagaagcggaccgatggatacgaacttctccggatgctttctgtaatacgcaggataaaaagattctgagtcaggttcttaataactacgatcaggaaacgactgatttctaccgttggaaaatcagttatagccaacaggaactagctgagttaatccatcaacgttcgggaattgatttcggggaaatcatagacttaatccctgtagagcgaggaacttccggacgcctgatacgattaaagatagtaggtactttacggacactgaccatcggaaaagaattagagatccgacgtacattgtcgccttcccatctttatagttcagcattccttgtggataaggaaaaaggagaagagggaaatgttccaacccgctttacactgacgggagccggttggggacacggagtaggactttgtcagatcggtgcggcagtaatgggagagcgaggttattattacaaagatattttagctcactattatcccggaagcagacttgaaaaacaatatgaataacatctgagactaatgccatgatatcaacaagaaatgccaagaacataataccaagaaacaatcgaaatccgtggagctggattccgactctttattttgcggaaggactgccttatgtggctgtgatgacaattgccgttatcatgtacaagcgcctgggattgtcgaatacagaaatagcgctttatacttcctggttatatctgccttggacgatcaaaccattatggagtcctttcgtagatctggtcaagacaaagcgttcctggattattgccatgcagggtttgattgctgccggtttcgccggtattgccttttttatcccgactccacactatgtgcaactcactctggcattcttttggctgatggcattcagttctgccacgcatgacattgcggctgacggcttttatatgcttggcctcaacaacaaagaacaatccttcttcgtaggcatcagaaacacttgctatcgtttcgccaatatcttcgggcagggaatcctggttatgttggcaggctggttggaaacatcgcatggcaatgttccaatggcctggagtatcactttctatctgatggcaggattattcctcggactgacactataccatcgctttattctcccccaccctgcttcagatgtcaaaagaccggggttaacaccgggtaagttactggaagatttctttaagacattcgtcactttctttgagaagaaaaacctgggacttatgtttttcttcctgctcacctatcggttgggagaatcccaacttgctaaaatagcctctccattcttattggatggtgccgaacaaggcggattgggattatcaaccgcatccgtcggagtcatttatggcaccatcggcgtagccgccctactgataggcggcatcatcagcggtttcctcgtttcccgtgacggttttaagaaatggatcattcccatggcgctggctatcaacctccccgaccttttatatgtctggatggcagcagctactccggacaacctcctgctaatctccatttgtgtagccatcgaacagctgggatatggcttcggctttactgcctatatgctttatctgatttatattgcagatggtgaacacaaaacagctcattatgccattggaacaggttttatggcacttggcatgatgcttccgggaatgccggcaggatggatacaggaacatcttggatacaccaacttctttatctgggtatgcgtatgcaccattcccggcatccttgcttcatggatgatccgcaatcgactggacagttccttcggaaaaaagagataaaattgaattacttataacttaacacattaaaaagtaacagtcatgaatgtaacaacaagtaacaaacgcctattggcactcgatgtgatgcggggcatcaccatcgcgggtatgatcttagtaaatacgcccggttcctggcaacatgcgtatgctcccctcaaacatgccgagtggattggattaactcctaccgatctggtattcccattctttatgttcattatgggaatctccacgtacatctctttgagaaagtacaatttcaccttcagtgttcccgcgggtttaaaaattctcaaacggaccgtgatcattttcctgattggaattggcatcagctggctttccattctctgcttccagcacgatcccttccctatcgaccagattcgcattctcggagtcatgcaacggcttgctttgggatatggagttactgccatagtcgctttactcatgaagcataaatatataccttatttaattgctgtacttctcattagttattttgcaatccttgccctcggcaatggatatgtctacgacgaaacaaatattctttccatcgtcgaccgtgcagtattaggacaagctcatatctatggcggtcagatacttgatccggaaggactgcttagtactatttcagccatcgcccacgtcttaatcggcttctgtgccggaaagctattgatggaagtaaaagatattcatgagaagctggaacgtttgttcctgataggtactatccttactttcgcaggtttcttactgagttatggttcccctatctgcaagaaagtatggtctccttccttcgtactcgtaacctgcggtctgggttccagttttctggcattactcgtatggatcattgacattaaaggttataaaaactggagccgtttcttcgaatcgtttggagtaaatccgctatttatttatgtattggcagatattctggcgattacgctggcagtcattcctatgacctaccaaggtgaagcgacttctttacatggctatatttacagtgcactcctacaacctgtcttcggagataaaggaggctcactggtatttgccctgctttttgtccttctcaactgggcaataggctacattctatataaaaagaaaatatacattaagatatgatactcattgcagacagtggttctaccaaaacagactggtgtgtcgtactgaacggcacagttatcaagcgacttggaacgaaagggatcaaccctttcttccagtcggaagaagaaatccaacagaagctgacagcttcccttctgcctcaactgccggaagggaaattcaatgcagtttacttctacggagcaggttgtacacccgagaaagctcccgtcctccgacgggctattgcagacagtctgcccgttatcgggaatattaaagctaattcggatatgctggctgccgcccacgggctatgtggccaggaggctggtatcgcctgtattttggggacggggtccaattcttgtttttacaatggaaaagagatcgtcagtaacatctctcctctcggatttattttgggagatgaaggtagcggtgccgtacttggaaaactgctggtaggagatattctgaaaaatcaacttcctgccaccttgaaagaagagtttctgaagcagttcgatctgacgcctcccgaaatcatcgaccgggtttatcgccagccctttcccaatcgttttttggccagtctctctccttttatcgcacagcatttggaagaaccggctatccgccaattagttatgaacagctttatagctttctttcgcaggaatgtgatgcagtatgattacaagcaatatccggtacacttcatcggatcgatagcctactgttacaaagagattctacaggatgctgcccgacaaacaggtattcagataggtaagattctccaaagtccgatggaaggattgattcaatatcatagccaattatcattccatccttaataatagaagaacattctaaagactaaaagcacaaattatacttcaatcttttaatgccacgcagttatgtaaagaatgataaccatttattgacccgtgttcagggccagtccgtaaaacactgattctcaacagataaaaaacatctagaatttctttaaaagaaaagatctgttggttttaaaggaacggtgtcttggttttaaaggaacgacccgttggtttaaaaccaacgggatcattctttcttcatattctcaatacaatgggctaagcggttgattctgtaaaataaattatctacatttctaccaagatacggaatacctttcccggatcagctgcccattctttcattgcctccaaagcatcttccggttttgcaatctttgagatcagttcttctaccggacacttaccttctttcatatagttgattaccgcacggaaatcagcaggcaatgcatttctggaaccacgaatatccagttctttctggacgaaatacttggtctgaaaagcgacttcttttttggcgtagccaatacaaaccacacgaccggtaaagccaacttcatccacagccattacataagtcacaggactgccgacagcttcaatcacgacatcagctccaaaccctgcggtgatttcctgtatccgctcatgtacattctctgttttagagtttactgcgtaagacgctcccactcttttggccagtaccagtttttcatcatccagatcgaccgcaatcaccgtcgctcctctcaaggcagcacgtacaatagcgccaatcccaatcataccacagccaatcaccatcacatactcattatcgatgacctgagcacgggaaacagcatgaaatcctacactcatcggctcaatcagagcacagtcacgggatgagatattacctgccgggataatcttcgtccaaggaagcacggcgtattcgcacatcactccattccgttgtacgcctaatgtctcattatgctcgcaggcattgacacgcccgttacggcacgaagcacatttaccacaattagtatatgggttcaatgttacattcatccctttctcaaagccagccggaacatccggaccgatctcttcaatcactgctcctacttcatgccccggtattacagggagtttcaccatcgggttacgccccagaaaagtgtttaaatcggagccacagaagccgacatacttgattcttaccaatacttcaccgacaccgacggccggcttttccagttcaaccaccttcatttcggaggggttgacaatttgaactgctttcattttatttgtttgagataaatttattaatcaattactttatagcccttccaaccgtaataggcacaaaacgcaaaacaaatcatcggtatgccataagcgacataataaatatgttcattaacgtgcatgaagtacgctgtcaactgaggaagacaggcattaccgacaattgccattaccaaaaaggccgaaccgctctttgtctgatttccgagtcctttcagtgccaaagagaactgtgtaggatacatgatagacataaagaaagagatggcgagcatcgcatacagtccgatcattcctccccatagcatcacgacaccacacaaaaggatattcatcaaagcatacaccagcaacatatcctgcggacggaacttgaccatcaatcccgtaccaatccagcgccctagcaagaaggccagcatgtacagtccaaagaaagtggtagccgtatcttccggcaaaccggcataggtgcagcagtaaacgagaaacagactgttgatagctgtttgcccaccattataaaagaactgcgcgatgactccccaacgtaaatgcgagcgtttcagcacatcgaaatcaatcagtttttctttctttccggatgcaggttccgctccttcatctccaatcttcggcaattttgagaaaacaaatacgaccgctatcgcaagaagcaacagagccaatatcagataaggaagtttcatcgcatccgtttccagttgtatataagcctgccagcctcccggataatcaacaggaagcgtctcgcgtgtataatgggtaccgcttagaatcagcttgctcagaaacatcgctgcgataaaagcgcctagtccattgaaggattgcgccagattcaatcggcgcggagccgtttcgggagctcccagcacggtgacataaggattggcggctgtctccagaaaacacattccggtagcgataatgaagaagatgcagagataagcccaatattctttcagcatggcagcaggaaaaaacagcaatccgccgacagctgccagcaacagcccgaagatgattcccgccttatagctataacgcttcatgaacatagctatcgggatagggaaaataaagtaagccagccaataagcggtctccgtaaaagaggcctcgaaagtgttcagttcacaggttttcatcaactgccggatcattgtgggaagcagattgctgctgatcgcccacaagaagaaaaggctgaaaaccagtgcgagaggaatggtatatgtattctttttcatgtgtacagtgattgtttagcggtatagtggctgtttcctttctattccgacatatttttaatgtacgggagttccggaagttctgcaaacccgtagaatttccgcgcattcccgcccaggaataacgttttctccacttccgacaattccagggatttcaccacaaagtcataagacatcttataagtaatggctgttatcgtgcgcggatagtccgagccccacatcagtttctccataccaaccagttctgcggcttcacgaatagcctttatggcacctttaaacggataaaactcgtcattgaacagccatgtgataccaccggactcaatcatcacattcggatgacgtgccaacttaatctgctccttccaatccggaagagtaaccatcccgaaatggccgacggcaatcttcaatcgaggacattcctgaataatctcttccatctccggaacctgtatcgccccctctgccaagtcgactgacaagatcactccccgctcttccatccaccggaacatctgcatcatttcaggacagttcaacattacccgtccctctttcagaagtaagcgctgggcaggaatcttaatcgctttaaatcccttcccgatcagttctttcgcctgtcccagatagcccggcttgcgaaactcacacattccgcaaacaaagaaacggtccggatagcgtgaaacaacctccatcagataatcgttctgaatgccgtctataaattcttgtgtaataaccgcagccgagacttgggcataatccatattggacagaaaaacttccgcactattcaccccgtcaatcataaaaggaggaaccatctgccgaatctcccccataaacagggagcgtccgttctctaaagtacggataggaaaaccatcgaccaccgtatcttggcgaagccacagatgggcatgcgcatcaataatcgtataatccatagaatcgaccgttttttttaagagtttgcccaacttacacgctgctgttctccgataatttcccgcacttcacgcacgagttcccaatcgatcgattcttcaataaagccgatatttttcttcacattctccggattagtggtgctgaacagggtagtcgcaatctttggattactcaccgagaattgcatagcgagcttttctatcggataattctttgctttacaatgctccatcgctttgcgacaggcatctaccaatggcttgggagccggatgccagaccggaacaccacgttcgctcagcaagcccatcgagagaggagaagcattgatgacaccgatttctttcgattcgaaatagtcaaggaagtcagccaatttatcatcgcacagacaatagtgacagaagctaagaacagattcaatggtaccgcttggcgaacggtctatcacccatttcaagttttcgagctgcaaatcagtgattccaacatgtcctaccactcctttctcacgcagttcgaccaaagcaggcaatgtctcattaaccacctgattcaggtcggcaaactcaatatcatgcacattgatcaaatcaatgaagtcaatattcagacgttccatactttcatatacactctccgtcgcacgctttgccgagtagtcccatgtattgactccgtctttgccatagcgtccgactttcgtagaaagataataacggtcgcgaggaatatccttcagcgctttgcctagaacagtctctgccttataatgtccgtaataaggggaaacatcgataaagttcattccggcttcgatggctgtaaacacagcctgaatgccttctttttcttttaaatcatggaaaactcctcccagagaggaagctccgaagctgagagacgatactttcatccctgtctttccgatttcatggtattgcatacgtatagggttttaaattattttgtatgcgacaaaagtaaggggtgaacccttctcaacggacaagagaggggcgaaaaagctacgtaacggtttacgtaaaaaatctttctttaaatgcggagatttatcagggaatatgctttctttgcagataaatctaagttggagaccttcagatggaaaaccggaaacatacttcactcaaagacctcgcccaagcattaggcgtatccatccctactgtatcccgagcgctgaaagacagcccggaaatcagccgtgaactttgcgccaaagccaagaagctggccaaagagatgaattatcgtcccaatcctttcgctatgagtctgcgaaagaatgcgccgcgcatcatcggagtgatcgttccggatattgtcactcatttctttgcctccattctgaacgggatagagaacatggcgatcgataacggatatttcgtcattatcacgacatcgcacgagtctttcgagcatgaaaaaaggaatatagagaatctggtcaatatgcgggtagaggggattatcgcctgcctgtctcaggaaacaactgacttttctcattttgctgcattgaaagagatcaatatgccgctgattctgttcgaccgtgtttgcctgaccgatcaattctcgtcagtaatagcagacggagcacaatccgcacaaatggctacccagcatctgctggacaatggaagtaaacgggtggcttttatcggcggtgccaatcatctggatattgtaaaaagaaggaagcatggttatctggaagccttgcgcgataaccggattccgattgaaaaggaattagttgtctgccggaaaattgattatgaggaaggacagattgctacggaaacattattatctctcccccagcctcccgatgccatccttgccatgaatgacacattggcttttgccgctatggaagtaatcaaaaggcacggacttcgtattcccgacgatatcgccatcatcggatacacggatgagcagcacgccaattatgtggaacccaagctatctgccgtatcgcatcagacttataagatgggggaaacagcctgtcaactgctgattgatcagattaagggagacaggacagtcaagcaagtggtgattccgacacatttgcagataagggagagcagcataaaagaaaaataagtcctgtattttatatcatttactttttaccgttgattttttatcctcctaattaactatatttcatttagaaatagttatttttgtagaaacaaacactttatgaaatcaaactacacaatctttttaatagtactattcattacattaaatgcatgtcataaatctgatattatccctcaactccaattagcagattcattaatgcttagtaaacctgatagtgctttaaacttattaagaagtttttctattcaagaaatacccagtaaatcagctaaagcaatgtatgcattgctcttaacacaagctttagataaaaattacattcaacatcaaaatgactctataatatcgatagcaatcgactactataaaaataaagataacaacaatttaaaagctaaatcatatttttatcttggaagggtataccaagataatgaagaatatgtaaaagcaacagaggcgtatttaacagttctgaaatctaccccgactgataaaacctttatattacaggtttacaataatttagcgatgtgctacgaaaatcaagaattttatattcaggcaataaaaacatataaagaatcttattctactgctgaactattaaaagataaatatggtattcttcatgcgacgcgaggcttaggtaacatttatgcaatacaagacgatgaagacagcgcactaacttattatcaaacatccttagccatagcacaatctatcaatgattccatatggcagactgccatattatgtgatatagcaaaagtttatgataatttaggaatgcatatagaagcaaaaaagaatatagaacatgcattaaaatatgcaccttataatacaagtttttcttccatttacttttggaaagggattattttacgcaatttggaagaaacagactctgctatttgttatttatccaaagctaaaatcaatgcagatatctatgcaaaagcatctatctaccaaacattatacgaaatagataaaaaaagaaaaaaatatgagcaagctattttatacaatgatacagcattagtttattatgattctatacaaaagatggttcatcatacagagattaatagtctcataaaaaacactctacagaaatgtatgaacagcgcgtagaaagtcagtaccaaaaagataaagcagtattaatcatttgcatattattgacaatatcctttgccatatttatactaatgtacatcagcaaccgcaataaaataaaatacatatatctacagcaacttcttatgaaaaaccaaacagaaaaagctgtattaaaagaagaaattaaaacaatatcacacactaacaaaattaacgaacaaaagtacatagatatagtaaataaaagatttgaattatggcatcaaagccttcaaacatgtgtacgtctattcaaaaccaccacatcctataagaaaatacaattaattgaaacatctaaaataaaaagagaaaaaggagtatcccaagaagatatttcattaatttatcaagaaataaatgaagttttcacggaagcaatgcaggagcttcttaaccaatatccaaatctaacgcaggaagatctctattactgtatacttaattatcttcaactttctaatgatactatcaaaaaatgtatgagggttgaaagtcaatatgcgctcaaccaaagaaagtatcgcataagaaagcaactatccaatcaaactttctctgtaatatttgatcttaaaaacgataaaagatagtcctgcaaaagaaagtgttatcattatctcatttttgttatatcaaaaacgcaacaccctgattatcaagatcgattatctttcatattgttatttcatgttattgttccgcatacgcaaacatcgtaattttgcaacaaaccaataacataaaatcaatatgaaacgaaatctacttttattctctcttatggttatttgttcaaatcttatctttgcaatgccattagatacaagaaaacaaatcaagatgaaggtcagagtaaagatagagcaccgctctgcaaatttaccatctcctgtacaagcctatgtaaataactcattattagaaatagaattcgaacatcctagcaatgatgtaacaatactcataattaattcaactaccggtgaaacagtttactatgaaaaaacaacatctttcgagaaaatcaaattcatcaacttagataaacactacaaaactacagaatatactcttaaagtatcctctcctttatgggtagctgtaggagtaatttccatagaataataaagttatgaaacgtaccaaatattctatatttatcatactgtttgcattactttgtccttcatgcaactctagaaaaaaatcatcacataatgacagagagataattgcagaattaggagaagaagtactttatactgatgaattaaatacgatcattaaacaagaactctttgacgaactaaacaaaatttatgaaataaagaagaaggcagttgagcaattaataaacgttaagttactacagaaagaggctgataaaaaacaactatcttatcagcaatatattgataattatacagataatcaaatccagcgattgggaatagattctctttcaaaacgttataatctgaaatcaattatagaatttcgtgatgctaatatgtataatgtagccacaaactctcccactggaaagatatcaggattatatcgcttgaaaggatttattatagataatttgctggattctttaaaacaaaataaaagaatagtgcaatatatttatcctcctaaaagtccatccattgatttaagcaatctgcacacttattatagaggaaatcttcaatcaaaagtatctattatcattatatctgattttgattgcgaatcttgtattaatgctcacaatctatatgaaacaatatatcaaaaatacaaagaaaaagtcaaatttggctatatccactattcggcaacaccaacttttgcccaaatagcaagtgaagcagccaatagacaaaataagttttgggaattccatgactcattatacacgcataaaggatacatagattcaataactgtatataatatagcacatagtacatccatggatattaacaaattcaagaaagatattgaagatgatgcagggaaaaaattaattgaaaaatcgataaatcaattagtactactcggtgtttatgcaaccccaacaattatcgtaaatggacgtttgattgttaattccaactcaaaacgagagatttgtcatcttattgacgaagaactatcaaaataatttttatttatccacatttattaaaaactgtattatgaaaaaagttacttttttttgtttcagcattttattagcttcttgttctctaaatgaagaagaaagagcgatgagtgcaagtgaaaacacacaattatctgacgaactagaaagtgtagttgctgattacgaattaacattaaaaggatattcttttgatgagttaaacaaagagaaagatgaattaactcctactacacaagaagaaacatgcgcggaacccgaattaatcaaggctatccaagattcattaaacaaactaatcttagcttatgacagtaaaacacgaactgacacaagagcttatggcggaaatgcccccaaagttggagtatttaagtatggtacttgcagtggtaatcgagaatttgtataccgaatggactgtgaagatggaggagatacacatgcaaccggcaatgttggttctacaaccgttgatggaaatgtaagatttagattttgcttagtagatccaggtaattatggtggaggtactctgattttatatgattatgtatggaatatcaatgaaggtgatgtagatcttgtaaagagatatcatgacaatgaggatcataaaaataaaaacagcttagaggataacggaggtttagtatccactggtttatctaatttcgggcataatacaactctttactggagatttagtgacaagcctgcacaaaaattaggctttcaacatggagttttaagaaaagctagttcaacacctattcctaatgcaataaacagcatatacatagacgacgaaaatggaaagaacggaaatgaagctatcttgtggacatatagagctatcaagaatggtccaacaggacctcttgttccacaaatatctagtcgtaatttaaacggtgaaacatttaggggcattacgacaggcaataacacaacttattatatcgatataatgaacttataatatgctgtttccagacaagttcctcaatattgaaaattattagatcactctccaataaaaattccctttattttagtataattctcaatagaatcaactaaaataaagggaattttaatattttaagtacgccgattacaaggactactaaatttctatcctaccaaactttacttgtaatcagctcataaacatacttattttcaacaatctaataatctgaaactaccgattccagttttatatcaaagaccaaaacagaatatccgggcataccatcccggtcactagttccatatcccatatcccaaggtaaataaacagtccatctctctcctgtcctcatcctctgcaatgtttcgatccatccatccactggtataatatgaggaggattagacattgaaataggattcacccagaattctgttggagaatcaaagtccccaggatcttttccggtaaagttctgatcaaacacctcacctgtataataagatccacgataatacgctgatacaacattcggtattacaggacgtctcccctcgtcatttttcaccgttctcttatagaaaatcttcattcccggatccgtaaaaggtacaaagaattccaattcaggatcagtttttgcatcatacacctgctgcaaagaatctaaaaaggcctcgttacgcgcccgccaattggcaaactttccctcttcttcggtttcgctacaagaaacaaaagccaaagccagtaatactaaggagaataaatagatttttttactcattcgttaatggtttattgtaaagttttcaataatgaggtgatgctcactctgtctgcaatgatattgttcagttcagagatagctacacgctcttgctgcatggtgtcgcgattacgcaatgtcacgcagttatcttctaatgtctgatgatccactgttacgcagaacggagtaccgatggcatcctgacgacgataacgcttgccgatactgtctttttcgtcatattggcagtggaaatggaacttcagagcatcgatgatctcacgggccttttcaggcagaccgtctttcttgatcaacggcataacagccagtttcaccggagcaagggcagcaggcaatttcagcacaacacggctttctccgttttccagttgctcttcgcaataagcagcgctcatgatgctcaggaacatacggtctacaccgatagaagtttcaatcacatacggagtgtatgattcattcaattcaggatcaaagtatttgatgctcttgccggagaatttctcatgctgagacaagtcgaagtttgtacgggagtggataccttccacttctttgaaaccgaatggcatcaggaactcgatatctgttgcagcattagcatagtgagccaatttatcgtggtcgtgatagcggtagctggcatcaccgaagcccagcgctttatgccatttcagacgaatctccttccatttcttgaaccaatccagttccgttcccggttttacaaagaactgcatctccatctgttcgaactcacgcatacggaagatgaactgacgggcaacaatctcattacggaaagccttaccaatctgggcaataccgaaaggtactttcatacgaccggttttctgcacattcagatagtttacaaagataccctgtgccgtttccggacgaagataaatcttcatggcaccatctgaagtcgatcccatttccgtagagaacatcaggttgaactgacggacttccgtccagttcttagtaccggaaataggacatacgatctcttcatcaacaataatctgacgaagttcatccaaattattatcattcagtgcttttgagaaacgagtgtgaagtgcatcacgcttagcctgatgttccaacacacgtccgttggtagaacggaattgagcctcatcgaatgagtcaccaaacttcttggcagcttttgctacttctttattgattttatcgtcatactttgccaactgatcttcgatcaatacgtcagcacgataacgttttttagaatctttattgtcaatcaaagggtcattgaatgcgtccacgtgtccggaagccttccagatggtagggtgcataaagatggcagagtcgataccgacaatgttttcgtgcaacagcaccatgctgtcccaccaatattttttaatgttgtttttcaattcaacgcccatctgaccgtagtcatatactgcgcctagtccgtcgtagatatcgcttgaaggaaatacgaagccgtactctttacagtgcgatacaagtttcttaaaaacgtcttcttgtgccattttcttttctatatctattaatttgaattaccttttttcgtaaaaagtgccacaaagataggcatttatctcataaataagacagggagggtattaatttatcttattcttctgtttgttcctgctcctgatctgctttcttcatctctttagtcaacatactttcgggcatataatatttaaaagggatgcgcatacactttgttttcttcatgcggtcacggagtacgctgtttgccacaaaataaacgcgggataccgatacttgtcccggtgtcacttgttcgggacgttcaaagccaggactggtcagagccgtttggaatgtacccagcccatcaatcgtcacagactgtcccatagaaagcaaatagcggatggcatccgctacttccaccaatatgccttcaacctgaccacggtggaaacctccccgcagctccaccacttgggctagttctttgttctgtactccgcctctatcctgtattttacttggtacaccataccataactcttttctttctccggacgtcaagtccgctttctttcttactacataagggattgccatgtcttatactcctttcttgtttcgtttatattttcattctgtacgacacccgggtgtcagcacgtatgacacccggatgtcagacatcacaacacccgggtgtcgtacagcacgagccccgggtgtcatacatatcttcttcgcaacaaagttagactattatagaaagaaaacaaactaatatttatatatttgtttccataaactttaatatacccgcacacactatgataaaaatactactgctgatcgattattccagtgaatttgacagaaaattgctccgcggacttgtacaatattccaaagaaaacggaccttggcttttctatcggcttccatcctattacagcggcatgtatggagaaaaaggtattctcaaatgggcaaaagaatggaaagctgacgccatcatcggacaatggaacaatgacaccgtcaatctactgaaagaactgaatattccgattgtattgcagaattatcaccatagaagcactacttactccaatctgacgggcgactacaaaggaacgggcagaatggccgcccaattcttcgccaagcggatgttccacaactttgcttatttcggcataaacggagttgtctggtctgacgaacgttgcgaaggcttccgtcaggaagttaaacggataggcggcaacttttattgtttcgaatccgataagcatgaagacgaaatcagaatagaagtaagccaatggctgcaagagcttcctaaacccatagcgttgttctgctgcgacgactcacacgcactattcatttcggaaacctgcaagataagtaacatacacataccggaagaaatctccctgttaggagtcgacaatgatgacttgatctgcaatatttccgatcctcccatctcctccatagaactggaagtagaaagaggaggatattccataggcaggctcattcatcaacaaatcaaaaaggaacatgaagggaccttcaatatcgtcatcaaccctatccgcatagaattgcggcaatccacagaaaagcataatataaaggacccttacattctcgaagttgtaaaatacatagagagtcattacaattccgacctgaccatagagtctttgttggcacagattccgctctcacgcagaaattttgaagtgaaattcaaaaatgcgatgcatacttccatctatcagtatatcttaaactgccgggtcaaccatctggccgatttacttcttactacagatcgttcattggcagacattgcaacggaagccggatttaaagactataataatatctcccggattttcaaaaagttcaaaggatgttcccctttggaatatcgggagaaaaaaatcacgaacagataaaaaataaattattcgtttttcgaatatagcttttcgtttttagtaccggaggcattactaaagtggcatatctttgttcggtaaatgttaactcttaaagtcaatcaacaacttatggagcaaaagaaaatcgtgctattcatcctgatcgttcatctggcagcatttctagcaggatgcagcggaaacaaaaatagcggaaacaatgactcctctgatctatggaataagttatcgagctacttccgcccgcccgcagaatacgaaaatgtatatgggaattttcgctctcctttattatattataatggggatacagtcagaaccgttgaagactggcaaagacgacgaactgaaatcaaggacagatggatgagcctgttaggacaatggccgcctgtcattaccggacaaacatttgaaattctggatactctccaccgtgaaaacttcatgcaataccgtgtccgcttctactggactcccaacgaacagactgaaggttatttgctggttccggacaaagaaggcaaaaagcctgccgttatcactacattttatgaacccgaaacggctatcggattgggtggaaaaccttatagagactttgcatatcaattgacgaaaagaggatttgtcacattatcaataggaacaacgaagaccacagagaatcagacatattccatttattaccccaccattgaaaatgcaactctccaaccactttcagcattagcttatgcagccgcaaatgcatgggaagtattagccaaagtacaggacgtcgattctacaagaataggcatcacagggcattcttatggtgggaagtgggcaatgtttgcctcatgcctatacgaaaagttcgcttgtgcggcatggggagaccccggaattgtattcgacgaaacaaaagagggatatatcaattactgggaaccctggtatttgggatattatccgccaccatgggaaaatacatggagtaaaaatgggcatgattatgctaaaggcatttatccgaagctccgcaaagaaggatatgatttgcatgaattgcatacgctgatggcacctcgcccatttcttgtttccggaggatactctgacggaacagaccggtggatagcgctaaaccatacaatagcggtcaaccggctcttaggataccgtaataatgtcgcgatgagcaacagagtcaatcatgacccaacccctgaatcaaacgaaattatatatgatttttttaaatggtacttgcattcagcaaataaatctaccaaagagtagaaagatgcgttttttgaatacactttttcgtttttttgcgcaaaaaatcaactctggatgcctaactttgttctatcaattcatccaagtaacctaaattacttgactaaaatgattagcctatgaaaaatatacactagaaaacataaaatgccccatctgcgaatggggcaatattaatgccatattaataaaactaatcataaattatcgcccaattaataaataacacaataataaattcataattaataaattaaaagtgctagctcaaaggaattaataaagctagcagatgattccgagttagtaataaatattaaactattaaaaattcaataggtcaaatatatactaaaaagagtagaaactaaaaaaagtaaactatggaagcgaataatcgcagagatttcttaaagaaagccgcattagcgggagcctccgccctaatggctcccacactactggccgctgaaggcaaagatggaagtgaattcgttctctctccgagcaaaaggacggacagcaaattaattgtaccgaagaataatggtctgaaaatcacaggcacttttctagatgaaatatctcacgatattccacaccagaactggggagaaaaagaatgggatctcgactttcagcacatgaaaaggattggtatcgataccgttattatgatccgttccggatatcgcaagttcatcacttatccgtccaaatatctattaggaaaaggatgctatatgccttccgtggatttagtagatatgtacttacgactggctgaaaaatataacatgaagttttattttgggctgtatgacaccggtcattattgggatacacgtgatatgtcgtgggaagtggaatataataaatatgtgattgacgaagtatggaatacttacggtgaaaagtataagagtttcggaggctggtatattagcacggaaatcagccgcaataccaaaggagctatcggtgcatttcataccatgggtaaacaatgcaaagatgtatcgaatggcctccctacttttatatccccttggattgatggtaaaaaggcagtcatgggaaccggaaaaatgacaagggaggatgctgtatccgtagaacaacatgagagagaatggaatgaaatttttgatggtatacacgatgtagtagacgcttgtgcttttcaagacggacacattgactacgacgaactggatgcttttttcactgtgaacaagaaactggcagacaaatacggaatgcaatgttggacaaacgcggaaacattcgaccgcgatatgcccatccggttcctgccgatcaaattcgacaaactccgcatgaaactggaagcggcaaaacgtgccggatatgataaagcaatcacttttgagttttctcactttttaagtccgcaatcagcttatctgcaggcaggacatttatatgacagatacagagaatactttgaaatcaaataaactatatgaaaacaacaattaatctgggttatatcatattcctttcagtcgttgctgctttaggaggctttctgttcggttatgacacagctgtcatatccggcacaatagctcaggtgacacatctgtttcagttggacaccttgcaacaaggatggtatgtaggatgcgcattgatcggatcgattgtcggtgttctcttttccggaatattgagcgacagcatcggacgtaaaagaacaatgatactttctgccattctgttttctacatcagcaatcggctgtgctttttgcattgactttaaccagttagttgtttatagaatcataggtggcatcggaattggtgttgtttctattgtatctcctctttacatttccgaagtttccgtcgcacaattcagaggcaggatggtctccctgtatcaactggccgtaactgtcggttttctaggagcttatcttgtcaactaccagttattggcatattcagagagtggaaaccacttacctatcgcctggttagaaaaaatagtagttacagaagtgtggagaggtatgttaggcatggagacattaccagccataatattctttattattatctttttcatacccgaaagccccagatggctgatagtaaaaggacaagaaaggaaagccacttatattctggaaaagatctacaattcatttaaagaggctgatttccagctaaacgagacaaaatccgtccttgtttccgagacccgttcagaatggtctatccttctgaaaccaggtattctgaaagcagtcattatcggtgtatgtattgctattctgggacagttcatgggggttaatgcagttctttactacgggccttccatttttgagaatgccggtctttcaggaggggattctctgttctatcaggttcttgtaggacttgtgaatacactgaccactatcctggcacttctcatcattgacaaagtaggacgcaagaaactgatatattatggggtatccggaatggtcgtttcattgatactcattggcagttatttcctcttcggaaatgcctggaatatttccagcctgtttctgttagccttctttctgtgttatgttttttgttgcgccatttccatttgcgctgtgatattcgtacttctctctgagatgtaccctaccaaaatacgcggattagcaatgtccattgccggattcgctctttggatcggtacctatctgatcggacagctaaccccctggatgctccagaatcttactccagccggaacattcttcctgttcgccatcatgtgtgtaccgtatatgctcattgtctggaaactcgtaccggaaactaccggaaagtctctggaggagattgaaagatactggacccgttcggaacggtaaaatagaccttattaaataaaaaactaacaattatggatttaaaaaaattagcaaaccaatacaaagacgaactactgaataatgttcttccattctggttagagcattctcaggatcacgaattcggtggctatttcacttgtctggatcgtgaaggcaacgtattcgatacagataaatttatttggctgcaaggacgcgaagtttggttattctcaatgctttacaataaagttgagaaaaaacaggaatggctggattgcgctattcaaggcagtgaatttctaaagaaatacggacatgatggaaactatcattggtatttttctttggatcgggcaggtaatcctctggtagaaccatacaacatcttttcctatacatttgctacaatggctttcgggcaactcagtctggctacaggcaatcaggaatatgctgacattgcaaagaaaacgttcgatattattctctcaaaggcagataatccgaaaggtaaatggaacaaaatccatccgggcacacgtaatctgaaaaatttcgccctcccgatgatcctttgtaatctggcacttgaaatagaacacttgttggacaaagagtatctggaaaaaacaatagagacttgtatccatgaagtgatggaagtattctatcgcccggagctaggaggaattattgttgaaaacataggagtggacggcaatctcgtagactgttttgaaggacggcaagtgactcccggacacgacatcgaagcgatgtggtttatcatggatttaggaaaacgcctgaatcgccctgatctaatcgaaaaggcaaaaaatgtaaccttgacgatgattaactacggatgggacaaagaatatggtggcatctactattttatggaccgcaaaggttgccctccccaacaactggaatgggaccaaaaactttggtgggtacacattgaaacacttatttccctactaaaaggttaccaattgacaggtgacaaacaatgtatggagtggttcgagaaaatacatgagtatgtatggacgcacttcaaagatgctcaatatcctgaatggttcggttacttaaaccgccagggagaagtacttctgccacttaaaggaggcaaatggaaaggctgtttccatgtccccaggggcttatatcaatgctggaaagtactagaagaattacaataaatctaatacccaaaaacttttttattaaccaattaaattttatcttatgatggaacaatgctttaagcaaaaaagtagtttccgaacaatcagaatcatactattctcattgtcgatgctttttgcgtatgccacaaatggctatgcccagaacatggttaggggagtcgtcacagacgtgaccggtgatccgttgccaggagtcagcgtcgttgtcaaaggtacgaccacaggtaccactaccgatattgacggtagatactctatcaatgcatccaacactgccactcttgaattctcatacatcggtatgaacaaacaagagataaaagtgaacggacgcagtacgatcaacatcatcttaaaagaagatgtcgctaatttggacgaagttgtagtagtaggttatggaacacaaaagaaagctcacttaaccggatctgtagccacggtatctcaaaaagatatgttgaaaacaactgccagtaatatgtcacaaacattagtcggtaagttgcccggccttattacccaacaatcactcggacaaccaggatcggatgatgtttccatattaatccgtggttattcttcattcagcggttcaggtacggtacttgttttagttgatggagtagaacgagctatgggacaagtagacccgaatgacgtggagtctgttaccatcctaaaagacgctgcatcttgtgccgtttatggtatgaaggcagccaacggagttgtgctggtaacaaccaaacatgggcaagaaggtaaaacagatatcacctacagaggcagtatgactctatcgcacgctaccactctgcctaaaatgatgaacggaacccaatatatgcaatggtataatctggctcgcaaactagacaataatggcgtagataatccatattttaccgacgaagaaattgcggcaacttataacggagaccctaccgatggatttgaaaatacagactggacctccgacttatataagactacccttatgcaccaacacaatctgtctataaacggaggcagcaataaggtcagatatttcatcagcggcggctatttacatcaagatggtattattaaaggcaacaaaaacgaacgcagcaatttccgttcaaatattgatgtacaagcgaccaaagacattaaagtgtcactaaataccgcagcattaatcaaagattattatcagccgggaggatactcttatggcaatcaacaagcctatagtattttccatcagttgctttactctataccttttgttccgaaagagtatgaaggttatcctacttcggcataccgaggcgcaaccagcgcagccaatccgatctatggatctgcaaattcaggattccaggaatctcgcagagtcagaatagaaagttccgcaaatgtcgaatatacagccccattcctgaaaggtttgaaagcaaatatgttcatcagttgggactggcaagacctggcaagtaaaacatttgcttatgcatattctgtcaatgcctatgattcttccaccaaaagctacagctatgtacaaagtgcaaatctgctggcagatggtaacctatatcagggtgaccaaaaatcacaacaagtaatattacgtccgactatttcatataacaacaaattcggacttcatgatgtaggagcccttttcctctacgaacaaactcaggtaaaaagctctgcactgaatgctagtcgtacggattacgacttattcgatttacccgaaatatctttgggagatgcccaaactgcaactaatagcggttcttctgggaaaagtgcttacgccgcttatgtaggtcgtctaaattatgcctacgccaataaatacctggccgaagcatctttccgttacgacggttcttataagtttgccaaaggacaccgttggggattcttcccttcagtttctttaggatgggtgatgtcggaagaagactttttcaaagacgcacttcctaaaatagactattttaaactcagaggttcgtttggtattctaggtagcgacaacgttagtgctttcttgtacagaaaatcctactcttatactaataatggagtagtatttggcagtacacctaacactcaaggaacacttagcaacacagtagcttatccaaatgaacgactgacttgggaaaaaacaaaatcatataacttaggtttcgatcttagtgcctggaacggtttgttgggagttgagtttgatgtattctacaaatatacatacgacattcttcaaagtgttagtaatatctatcctccttctttaggtggacactacccaagttctgaaaatacaggaacatttgataaccgcggatttgaaattgcactgaaacatcgcaatcgtataggagaattcagttatagtttgaatggcaacttatcttacgctcataaccgtatcttaagcagaacacaggcggataacacattaccctggcaaagtgttctcggatcatcagtcggtgaattatggggattaaaagcattagggttgtatcagagtgaagaagagattgccaattcacctcaagtatcatggaatacaccacgagtaggagacattaaatatgccgatattaacggcgatggaaagatcgattccaacgaccgaatcaaaatatcacgtggcatccgcccggaaatgatgtttgcactaatggctgacgctaattacaaaggcttcgatttatctgttcagtttcaaggagcggcactttgtgataaaatgcttcaatactcatggcaagacttaaatggcgcaacagatatgacccctatgacaagaccctggtatgcaaattgggacaacgctcctctttatctggtagaaaacagttggcgacccgatcatacaaatgcggaatatcctcgtctgactgtcagcagtgtatctcattcaaacaatgcccaacaatcggatttctggaaaagaaatggtgcgtatttacgtttgaagaacgtgactttaggatatacgcttcctaaagcctggaccaacaagatgggattgtcaaacatcagagtttatgctaacgggactaacctactgacatttaccgatttcaagtatatcgatccagaaagtacaaatgtagcaacaggatattatccacaacaacgtacattcagttttggtatagatgttagattttaaaacaaatagttaatatgaaaaatataaaaaaatacattataggcatagcagctagcatttgcttgacacaatgtgatgtactggacgtagatcctactggctggtacagcgagaatgtagcatattcctcactggaaaatgtagacctttacgtcaaagggctatatagcgtgctatatgataatgctactatcaatatagattcttactgcttaatggacgatggagctacagatctgttaaaatactcttggtatggagtgaacggaggtgccatgaataaattcttttatcagacgaattatgtcaccgaaacgagcaacttccgctccaactggagtggtatgtatacccgtatccgtcaactcaacgaatatttctatgaccgaagcaaaggttatggagataacttagatcaggatgaaatgaaaaagcgtacagcagaggttcgtttcttacgtgcatttgcttaccaggaactggtgctccgtcatggcggagttatcctgcgtactgatgaagattatgtggacggacctgacgaaagagctaaagcacgttcatctgaatcagattgctgggatttcattatcaacgaatacacccaggcagtacaagaccttccggaaaactggacaggtaccaatgtggggcgtattaccaaaggagccgcttacggaatgaaagcacgtgcggccctttatgctaaacgctggggggatgcgatagatgcctgcaatgaagtattaaaattgaattacagtttattgcaaggaacgactgccaatgattactacaaaatattcacctcagtcaataatagtgagctaatccttccggtttacttccaacagggaaagaacgccaagcaacattcttttgacatctacgtgtgtccaccatacgactggaaagcagccggtgttacagaaggaagtgtaggtgcggcagtcactccatctgatgaatacgcttcctctttcgatatcaaagtaaacggtagctaccaatcttttgactggagtaatctcagttcctacaacaatgctccatttaccaatcgcgaaccacgtttttacgcctccattctttataatggagcaacatggaaaggacgtactctccagttgtatgtagatggaaatgacggatatatggattttgctacaaccggacaagataatgtgcacaaatcaacaacaggttatctgattcgtaagttcgcttctgatgataccaatatcaactttagcagcattttgagtggacaatactggatagaaatgcgtttagctgaaatttacttgattcgttcggaagcatatgcacgacaaaacgagtttggaaaagcctatgctgatctgaaaacgatccgtgaccgcgtcggactgccggaactcgcccaacaaaataattggagtgattatctggaagatctgtctaaagaacgtatttgtgaacttggaatggaaggacaccgatatttcgacctgatccgttggggaatcgccgtaagaacacttgatcataaacgtctgcacggcgttaagataacacaggccggtggcagtttcagttacgcacgagtagaatgcgatacacaagaccgtttattccctgaaaaatatacaattttccctattccatacacagaacttcaagacaacacactctgtgaacaaaatgaactgtggaaataataattatttaataagagaaaaattatgaaaataaaatatctattcaccggggtactaatatcaatgctagccttcatgagctgcgaggacccggacgatctggcaaggacaggcagcgaaaatgttacaggactaaccataaccggatgcttagcttctgatgaaagtaccacatatagtgctatcgtagacgaggcaagtaatacaattaccatacaagttccttattatatttcagatacggaaaaaatacaaggtgacctgacacaaatgaaagtttcagccagcctgcctgtaggagcaaaattctcccccagcatttccggcattcgtgatctggtcagtggtttccaatcaacattagtcaaagaagatggaagcaaaattacttatacatttaaggctgcttatgtgaaatcaaaattagccagtattagtaaagtagaactgacagactattcacgtgcaacaatacgtatcgtcgaacctgagagtacgggtggtacaggaaaaatcatcatctataaaacctcttcagctattgatgcagccttgaagtctgcggcattaacagtctctccatgggctactatcgaatcatcatcattggatccggcaaccggcattatagatttaagtaaccaaccgactataaccgttattgcacaaaatgaaacagacaaaacagtctatcagactagtctggaactcccggatctattacctcagggagtgggctatacagcttcattatttggtttccaaatctatacagatgacacacatggatttgaggttggagcgaaccgtacaatggctgttattgacgactatctaattatcagtaatagcactgattacaataaaatgattgtaatggatcgttataacggcaaagtacttgatgtaaaagtcaacactacaggtattgatgcaggccgctccatccatgctattaccagtgatgatgctggacatttagtagctatggcatacactagtactttagacgccaatgttaccgacccaaacgtacgtgcctgggtttggcctaacggcatcgagaatgcacctaagagcatcgtttatgcaaatattaatgggagtacattcgccaatgctcctgtaggcattaatggagtcaaaaaactagagcttggacgcacaatctgcgtcaaaggtgatctgacttcaggggatgcaattattgccacatcaaccaaaaatgtaccacgtgcggttttccttatgttcaaagatggtgcaatgcaaggcaacgcttatgtagaatggggcggaggagcatcagtctccatgtggaacgcaactaaagtcattccattgacaaatacttctccactaggatatatttgggccagtgccaacttccggcaagcaattaattacactcctataggcacaggcgcacgcgccatagatttctcacttccaacatcacattggtggtccggtagcgctacatatgataagaatgtccggggaataggatatgttgaatttaacggtacatgtttgttaggcgttcaaaatggtctgtcaagcaatggggtttggtcccaccgcctatatgtatccaacatcacgaataatcccggaacttcagcaatggctaatggctttatcttcgattcacgtgaaggaagtacaacaggaacaggcagtatccccggaacggggtatgcggtaactggtatgacatcttcagcctcgttcgtttctggcaaacaggtacttggtaccaacgttgatgaaacaggagatgttgtattcggtcgaagtgctgatggcaatgccgttcaggtctatatgttgactacggatcagggactatttgcttatgaaattaccagattcaatttataaatgaaaatttaaatatcatttaagatcatctataaactactcagtaacagttggcaattacatatgaataattgcacaactgttgctaagtagttattaaagtcactagattataattaaaaaaatccgatggtacaatttttccaagaaatacaagagcaaccgcaagcacttctgcagacggcaaacttctacaaaagcgtagaaggaaaatccgttttgtcacaaatttcagaattatggtgttccggcaaatatagaaatattctgttaaccggtatgggcagttcttacttcatcgctaacgcaactgcttctctacttaattcatataaaatcccggcatatgctctgaacgcaggagaattattgcattatcaaatttcattaattagtccagaatcgttgattatatgtatttcgcaatcaggagaaagctatgaagtaatcaaactaatagaaaagttatcttcaaacatcacagttctttctatttgtaatgaaaaagatagcagtttagtcaaattctctcgctatagcctattgtgcaaagctggaaaggaagaaaaaacgtcaacaaaaacattcataacctgttatcaagtagcatatttactggcaatgaagttatgcaatcaagaaatcgacagcacccaatggcataaactcagtaaaattattgagaacatggtcaatggaaatactccatggatgtcgaaagctattgaactgatagacggctccacttttgtgcaattaataggacggggaccagtttttgcagctgccagccagagtgcattgatgttcatggaagcagcgcatacgcctgcatcagctttattaggtggtgaattcaggcatggcccgttagaaatggtaaagaaaggattcatagccattctatttgcacactcgcaatcagaaacctacgaacaatcactatctttagtaaaagatatccttaaatatgaaggaaaagttatctttatcaccgattcaaacttagtgtttgaaaatgataatttatgtgccattactatcccaagcactaatgctgagttatttacaatcccctgtatagttcctgtacaacttcttataaatacatgggcaaccaaatgcggaataataccaggagaatttacacatggtgccaaaataacatcaatcgaataaactatgagaattgtgtatccaaagaaaattgcaattggagtcgatattggcgggactaaaataaaagccggacttgtcgatattaacggacagataatcggtatccccgaatctatccggactttagcgcacgaacccggtgaaatgattattgagcaattgactctattaatccgaagaatgatacaacaagccgatggagcagaattaatcggcatcggcatcggttctaccggtccattagatatcaacaaaggcatcattctcgaatgcaataaccttccaacgttacacaattaccctttacacaaaaaaatagaatcaactttcggacttccggtcaaactggataatgatgcaaatgcaatgatgttaggagaagccctatggggagccggaagaaacctaaattcaatactaggaatcactcttggcacaggcttaggagcagctatagtggtaaacagaaaaattattcgtggagctaccggttgtgccggagaaatctggctgtctccatacaaagaaggaatgatagaagattatgtatcgggaactggaatatcaaatttatatcagagaattacaaaaagaaagatttcaggagaagaaatcagtaaattagcccgggaaggagacatcaacgcattaaaagcatggaaagagtttacccaggcattagcttatgccctttcctggactgttaatatcgttgatccggaagtcgtaattatcggaggctcagttatgcattcatcagatatattttgggattcaatggtatctttatttaaaaagtacatttgtccgcaaactgctgcaagcatccagttaaagccagcaggtttaaaagataatgccggatttatgggtgcagcagctttaatgtttgtagaataaattgttatgaaaaaattacttatactctatccgtttctattgttttgcttgataagcaaagcagataaccagttgaaattaaccaattgggaaataaaaagtacaaccgaaataagcgaaaatgcggaaaaagtatctatgccttcattccaagctaccgactggtatgaagccacagtaccgactactgttttgaatgcattagtgaaacagaacgtttatcctgatcccagaatcggcatgaacaactttctaattcctgatgtctctgatgagtttaataaaaaaatggacttagctaaatacagttacctgggcaatggaaaaaatccttggcaggaaccttattggtatcgcacgaccttcactttgcctaagcaatataaaaacaaaaaaatatggctgaacctcaatggaattaactatcgtgcagacgtatggattaatggacatcaaatagggaaaaaagaagatgtagtaggcatgttccgccgcttcaaattcgatataaccgattatatccagcccacacagaactgtattgctataaaaatatatcaagtggaccatcccggaactcctaaccccggaacacaatttatagcctttgggcctaaccgtggtacggcttccgatttgttcaaagatgaaacattaaaattcacaggtggttgggattgcgcccctgtagtgcgtgaccggaatatgggtatttatcagtccgtcaccctggaagcaaccagccaggtcactattgaagacccatatattatcactactctaccccaaaaagatacaacagttgctgacattacaatcaaagcgactgtacacaatcattcggataagatgataagcggtaaagttaaagcaacaattcgccttatcaacgaattagtttatccgagttacacacgtaaactggctggaagcatgaaaccgataagcgtaactctgcctgtcacaatgctccccaatgaaagtaaagaaataatattatctccccagaagttttccgtcttatctatacagaacccatacttatggtacccaaacggatatggagagcaatatatgcacagtctcgatttatcattcgacatgaataatgggaaatcgtccgatcgggagaaggtaaacttcggaattcgcgaagtaacttcggaattaatgaaaaacggggaagaatatggtcgtgtattctttatcaatggcaaacgcatcttctgtaaagggggatggatacaaccggatgtacttctcgacgactcacccaaacgaatttatgaccaggcacgattaatggcaaatgccaacattactttgatcggcagtgaagatatgccttccccttccgaagattggctagatagctgggataaatacggactgatgaactggcatgtattttatcaatgctaccgaatgttcccgggacgtgacaaccagcataatcctctcaacaatgacttagctatcgcttgcgtgaaagacatggtcaaaagataccgtaatcatccctgtatcattgcatggttcggagttaatgaagtgttggtagatgaagaattgtatcatccgaccaaagaagccgtattaagcctcgacacgacacgcccctacataccgactaccagtatcagttgggacgtagacaaactaactccttatttaaaaccggacttaccaaccggtactaccgatgatggcgctcccgactataactgggcaccctccgattactacttcgacaaagtagaagaggtttatctgcaaatgttcagaaacgaattaggcatgccttccgtacctgtatacgaaagtttgaaaaagtttatacctaccattgataagccacttgaccggagaaatccgatttatccattagacagtatatgggcggaacacggagcatgggacaccaataacttctgctatcgtgcatacgacaatgcaatccgaaccttctatagcgacccagtcagtagcgaggattatgcatataaaggccagctagtaagttcagaagggtatcgtgccatgtttgaggcagccaaccaccggatgtgggatatcacaacagggataatgatctggaaactaaactcttgttggcccgatgtctgctggcaaatttatgattggtatctgtcacccaatgcttcttactatttctcaaagaaagcaatggaacccattcatattcaaatgaatgcaaatacgaaccggatttctgtgataaacgctactcatcaagaacttaaatctgttatagccaaagccagaatcatagactattcgatgaaagaatgctgggcatacacagataccatatccgtgggcgccgaccaatataaagaattagaaaccgtacctcaacgaggtgacctttctgccatatattatataaagctggaattagaagacttaaacagaaatcttatttctgaaaacttatattggcgttactcgcaacatcaaaatttctattggctggtaaatatgcctaaagttacattaaagcaagatttaaaacttcaaaaacaagaaaaagagtatcagatcacgcttactttaacgaatgactctgataaattatcctttttcaaccacttaatgatacaaagagaaaaaacaaaagaagtcgtaaatccggtattttggagtgataacttcatttcattgttccctaatgagacccgtaccatcactgcgacagtatccatagaggatttacatggagaaaatcctataattattattaaataactaataaaaccaagaaacatgaaactattacttacaaccttggcaatagtctatctaagtttgttcatgagcctgcaagcacaagaacaggtacgggttatcccctatcctgctgaagtcaccatgcaagcagaaacgtgtaaactcaaatcggatcagaaaatccactatctggatgccagtttatataaagaagcagcattccttgaaaagaaactcgctgatttaaactataaaatgaaagtaatccccggcaaaaaagctgcgaaaggaatcaacttatcattagacaatagactgcaaaacaaagagggctatcagctgattatcgcccccaaacaggtcctaatcaaaggaggaagtccagctggagttttctatggtattcaaacgctattacagcagttaaccaacggagatctaagatgtggaacgatagaagacgccccgcgttatgaatggagaggatatatgcttgatgaagcacgtcacttttccggcgaaaaaagggtaaaacaaatccttgacctgatggcatattataagatgaatcgcttccattggcatctgacagacgcacaaggatggagaatcgaaattaaacaataccctaaactggcaactataggaggagaaggttgccatagtgatccggatacaccggcacaatattatacacaagagcagatccgtgatatcatagcatatgccaaagaacgtcatattgaaattatacccgaaatagacatgcccggacatgccacagcagccaataaagcttacccggaatactcaggcggaggaacggaagaacatccggaattcacttttaacgttggcaaagaagaaacttatacttatctgactaatatactaaaagaaatagctgccttattcccttctccatatttacatatcggaggcgacgaagtagcttacggaatcaaggcatgggaaacagacccacatgtacaagcactattgaaacgcgaagggttacaaactgtaaaggaagcagaacgctactttatgcatagaatgacagatgtagtaaactcactaggtaaaactttagtcggttgggatgaacttctcgacttgaatgtaaagcaagataatactatcattatgtggtggaggcatgataaacccgattacctgcgcaaatcactgaccaaaggatattcgactatcatgtgtccgcgcaaaccgctttattttgacttcgtacaatataaagaccacaaatggggacgaatctgggacggattctgcccaatagaagatgtatatgctttccccgacaaatggtttgccgaatggggagtgtcagcctctgacctctcacatgtcaaaggcatacaggccaatacatggacggaactaatgcatactaaagatcgggtagatttcatgatctttccccgcctctgcgcactggcagaatcagcttggtccgcaccgacagtcaaagactacgacaagttcctgtcacgtatggaagatgcattcaccttatttgataagctgaatatttattactttgattatcgtaatcctcagcaccatccggaaccggctggtcctgtcatcaaaaagaaagaaaaaatacaaatggatttccgtgactaaaaaaagaaatgctacatgaagattcttatctactttttaataattgtactgtggagcatcaatatggaggcaaaagtcaaattgcctccactacttagtgacaatatggtcttacagcaaaaaagcaatgtacgaatctggggaaaagcgactccaaattctactgttgtagtaactccttcatgggcaaataaggaagtcaaaacccatgctgacgaaaaggggtgttgggaattacagatcacaacgcctgctgccagtttcgaagaatatacattaacactgacggatggagagcaatctgtcactttgcagcacctcctgatcggagaagtctggttatgtgccggacaatcaaatatggtaatgcctttgaacggatttgattattgtcccataagcgactccaataatgtcatagcagatgctcccaatcatccgggaatacgaatggtaaccataaagccgacagtaaaactatctccgcaggagtatgcagaaggaagctggcagcaaccaactacggaaaatgctccgaagtttagtgcagccgcctatcattatgcattaactttacaacggaccttgcagattcctataggagttatcacctgtgcatggggaggctcaagagtagaaggttggctacctaaggaaatactacaaacctacaaggatgaagacctgactttaataggaagtgacaagacaccagtctatttacaatcgatgttaatgtataatggaattttatacccctgtcacaaatatacaataaaaggttttatctggtatcaaggagaaagtaatgtaagaagtagcagaacatacgccgaacgcctagctacgatggtaaaacattggcgatcaatatggaaacaaggagacctgcctttctactatgttgagacagtcccatttgcctgtgaatataaagaagatggctacataggagcattattgcgggaagctcaacaaaaggcgctttcactcattcccaatagtggtatgatcggaacaaacgacttagtagagacatacgaagctcctcaagtgcatcctcacaataaaaaagggattggagaacgcctcgcatatatgtccttgaataagacatacggatatcagggaatagaatccgaatatccatcttataaaagcatgaaaatcaacggagagacaattgaaatctccttttcccatgcagaaaaaggattaagcccctggatgaatatctccggatttgagattgcaggttcagataaagtcttttatccggcagaggcctctttaaatcagaaggatcatacagtaattgtcaaatccccaacagtcaaatctcccgttgccgttcgttactgttttcggaatttcctgaaaggaaatctgattaatacacgcaatctgccggtcagaccatttcgcacagataagtggtaataaaaacataaaataaatgatgaaaagaatatattatacatatccggttttattagtctggcttgtgtcgacattgttgccacaattttgtatagctatgcctaatgaacagaaagaaaacaatgatgtggtcatagagaacgcggaaatgcgtctaattattagcaatgacggaaaagcacgcagcctgatacacaaagctacgggagaggaatgtctgataacaaatgcagatgtacctttatgcgctattacccaataccgtccttacgataatgaaaacttcctaatgtttcctgcaaagccacgcaccttcccagccaataaaattgaacgtaacggaaatgaattacgtatagaatttcaggatacctatgacattgccatcatagagttaaatatcacagattattatataggtttcactctgaagcaaattgattatcgtatcgaagattttggggtaaaacgcaaaactgaaatagatgaaatctcattattacaattaccagtacgtaaacgtgagaactttggtgagtggctgaatgtatcatgggatgaacagacagccatatgcctgctaggcacccatccgaccacctatatcgatgcttttgcaaacaaggaatatactacgatgtatgcaggacttgattttcaagtgaaacttttcaattccggtgcagcactgattactacttcaaaagaaaaactgctaacctgtattgataaagtagaacgtgactatcatatgcctttaggagtagaaagtcgccaacgtaaagaatatcagtactcctattatgagctacgtgatgtcacgactaaaaatatagatgaacatattgcatatgctcaaaaaggtggtttcaaatccattgtcgtctattatgttgatttcgccaaagcttgcggacattatgaatggagaaaagaatatccgaatggaatgaaagatttacaggaaatcactaataaaatcaaagcagcaggcatgatacccggcattcatattcattattccaaagtagcagtgaatgacccatatatcaacaacggcataccggactcccgcaccaaccatgtacgcgaatttattctctcggaaccattagatgattcaagtactatcatcactatagaaggtaatccggaaggtgtacgtatggagaaaggacgacgtctcctgcaaattgacaacgagcttgtcacttatgagaactataccaccgaaccaccatatcaatttacgggatgtgtacggggagtatttaactcaaaagcagcctcacatgacaaaggacaacatttcagactattggatgtagatgactggcccctgtttatccgtgtcaaccaaaatacaggaatccaaaaagagattgccgaacgtttaggaaaaatctaccacgaagcaggctttcgttttgtctattttgatggtgcggaagatgtaccgatgccttattggtataatgtctcccgctctcagatgatagtatacaacgaaatgaaaccaactccattatttgcagaaggagcattgaaatcacattatggatggcatattttaagtcgtgggaatgctttcgatatattccctccggaacgtatccgtccggcaatgaagaagtatacacttcgatgtgcagagcagatagccaaagattttacttctgtcaatttcggatgggtgaattacttggctcccaacgacaagacaataggcatgcaaccagacatgtatgaatatatttgcagcaaagctgtcgcatggaattctcccatatcattagttggcaatttaaaagagttacagaatcatcctcgtacggaagataacctgagagttatcaaaatgtgggaagaagtaaaacttcaaggtgtcctgacagacaaacagaaagaattactcaaaaatcccgaacaagaatatcttctgatgaaagataaaaaaggaaattatcagttatacccctatcgtcaaataaccaaggatgacgaaaagccaatccgggcattcattttccagaaagcaggaaggacttgtatcatttattggcatatgaacggtacagggcaactcactcttgatatagaaaaaaacaagctgtctttgatgaatgagagtggtaaaagaatacctatccggtcagcaggaagcaaaagtatcctccccgcagcagggcgtctcatattggaaaccgctcttccacaagaggaagtaataaaattattcagaaaaagcatcgaaattattaaatagaaattattcatcctaatcttttgtatatgagaaatatgataaccggtattattagcatattatgctatttacaatgttttggaactttatcagcctcagtgactgctaaaaatgaaaatggaaactttgtattaaaaaacaagaatgttgaattagtgtttgccaacggaaaagaattcttattcaaggaattccgcatggatggcatgaacatattgcctgtagatggaagtacaacacatccgtggcaactaatctatcggggtcccaacggagagaacccgaccttaatgccccgatggggcgaatataaaggaggcgagatacaaaaaactcaagatgcctcaacattaatattcacctggcaaatggttatagatgcaggaccgacgtgtccggtacgcatattagtcacattaggtaaagatgccgaactaccggaatggcgcattgaagcagaaatgccggaaggatgggtgattacagaatctgaatttccccgtattgctgtaaacagaccggaaggagcaaaaggaattcttcctgtcggattcgggaccgaatacacaatcggcaatgaaggacaactgcaatcacgttatccttcgtgtacaggcacaatgcaattagtgctgatgcatcataaaggaggcacagtctactttgccgcacaagacaaagggggatctggcaaagtattcagaatgaaaagtgaaggaaaaagtcttgtatttattcagaatgtgacaacatcctatgcctggactcaaaacaagaagttctgcattccttgggaaacagtgatgggatttacccaaaagggatggcaggacgctgcagtacaatggtatcgtccatttactttcgaaacactgtggggtgcaaaaactatttcagaacgtcctatagcagaatggatcaaaaacgctgatatgtggctacggccgggagaagtaaatgctgaaacaatggaagcagtacgtaaagcgatgaaatactatggaaaaggagtcggattgcattggtattattggcacaatcatcgtttcgatactaaatatccggaatactttcccgaaaaagcaggattcaaagaaatgattaaagaaacacaggaacttggaggatttattactccatatattaacggtcgtctatgggatccagcaacagacagctataaaacgcttaatggtaaagatgcctcttgtcgcaaagctgatggtacattatatacagaagtatatagctcaaaggtattaaatactgtaacctgcccagcttcttatatttggagagatgtgctgaaaggagtcaacaaacagatattaactgaactaaaaacgaacggtgtatatatggatcagataggttgcgccaacagcgaaccctgctatgcaaccaaccacggacatgcacctggcggtggtgattggtggccttttgcctaccgcagtttactcaccgaaatgcgcacaaatctatacaaagagaaccaagccatgacaacagaagaaaatgcagagtgctatattgacctgtttgacatgatgttagttgtcaattctccgcacaacagctatacaaaaatggttccgttgttcccgctcatttattctgaccgttgcatctatagcggatacacctacatcccttggcgtatcacagacggttctttgaatttcatgagtatgcgtagtctgttatggggttctcagttaggatgggtagagcccagtctgttgatgcgcccggacgctaaaagggaagctaaatttctgaaaaatctgacagatttccgccgtcaacaacatgatttattcttgggaggccgttttatacaggaaataattccaactggtgataacccaacgcaagagatacccaactatgaaataacttcggtagtattagcggcagaatgggctagtgtatcaggcgaacacgtataccttatagtaaatatgagtgaacaagaacacaaggttacactgcctaataaaaaacaaataaccgtcaaagcacttgatgcgatcagaatcagcaaataaacagtctttgtaatcaaacaataaatagtacagtaaaatgaaacagattatatttatagcaatattattaacatgtgccttcggagcctgctcaagtgacaatgacggcgacgaacagtctgcaagcgtacaagcaccttcagacataaccatagaaagaatgggaaaaaccaaagtattactacgttggaaagacaatagtaataatgaaaccggattcagcatcttattaagaaaagcagataccagtgaaaatatagaaatagccaaggtatccgcaaatgtcacagaatatacaatcgaaaatggtctggaagaaggaaacatatactatttcggagtaagagcattctcggctacgaatacttcacgtgccatttacgagctctatcggttggtagccctcggtgacgagccaagcatcgcaatcataggaagtatcaaagcaaactcaacttgtatcagttcctcttatcaagtgacaaacatagctggacaaaccaacgtaaaatatggtttatgctggagtaccgaaaacacacccactatcaatgatcaaaagcaaaacggaccggaagttgctgaagacggaaaagtatttcaagtgattccgaataccttactcgactatggcaaatcctataaagtacgtgccttcctgacaacctctaccggtacttattacagtgcagagtcgactgtttccttggaaacagagccacaagcgatccaattgacatggaataaactgaccaagtctacattaccggcagaaatcgaactgtacgaaaccaccagtaacttaaatggtagtaatttccatgcatggtacgccattggtgatctctctaccggtaaggtagaagtacgtgtccacataccatcttctcccgcaaccatcgacacgcaatctgcgtcattcaatggagactgttatttattggtcaatggaggatacttctataatggaaaccatacaggaatagctgttatcaattccattaaatcgggctctgtttcagccgttcgggggtcactaaaaactggcgatacagaatacaacagtatgtataatgtgacaagaggaacattcggcgtagatgcttcaggcaagccgaatgttgtttggacaggaacggatgcctccagcaatgttttctatttcgaccgtcctttgccatctgtcaaaggagaaaataaatatggaattgtcactaatgaaaatccgactaccgcaattagctggagtcctaaatatgctttaagtgcaggtcctgtattactgaaagacaaaaaaatcccattcgattttacagagacatcaaagggcacagattactatctcagtaactatgaaatcattccgtatgacattttcggagcgaatgtaaccccggaccgtacagcaatcggttatcgtgaagatggaaaagtggtcatattcatatgtgacggacgtattaccgccagtggtggagctactttaacagaactggcacaaataatgaaaggattaggctgtgtaggagctattaatcttgatggcggaggttctaccggaatggttgtaggagacgaacacttgaatgacatgaccggaggaaaccgggcagtcgtttctacaattggattcttcaagaaaaattagcccaatccggatattcataaaagctatagcaatatacatagtaagtttctttttatgtatattgcattgcttttataaacaaccatttattatgaaaagacatatcatcattttgctcattacattcttgtgcttgccggaatatctggaagctcaattaaaatattatgatgctgccaagtttccattgtatggtaaagccacaaagaatacagaaaatcgctacgaacgattgccggattcattaaagcatgtctctcgtaaaccggtatggaatttaagcagaaactccgcaggattagcaatcagattttgctccaattcaacaacaatagccaccaaatgggagaatttgaataataacctgatgaatcatatgacacctaccggtactaaaggactcgatctatacacatgggtagacggagcatggagatttgtgaatagtgggcgccccaccggaaaagtgaatcaagctacaattatagcaaatatggaaccggtcgagcgagaatatatgctatatttacctctttatgatggagtaatttcattgtccatcggaatagacgcagaagcatctatatcagtacctcgaacggcaattccagtacggactaaaccaatcgttttttatggaacaagcattcttcaaggtggctgtgccaatcgtcctgggatggcacataccaatattatttcccgccgtctcaatcgagaaatcgtcaatttgggattcagtggaaatgcacttttagactacgaaatagccgaagtaatgtcctcagtagatgcaggagtgtatgtactagacttcgtccctaatgcttcctccgatcagatatatgagaagatggaaaccttctatcgcatacttcgggataagcatccacgcactccgattatatttattgaggaccccgtattcactcatgctctgttcgacaagaaaatagctatcgaaataaacaaaaagaataaagccgtcaacagtgtcttcaaatctctaaaaacaaaaggtgaaaagaatatatacataatttcttccgaaaagatgcttggagaagatggagaagcaacagtagacggtattcatttcacagacttaggaatgatgagatatgcagaccttgtttgtccggttataaagaaagtattaaaaaaataatttactatgcagtacattaagcagataatgttattggttatactaacgattagttggaaatgccaggcagaagaagtaaaagaaatttggctggacgagttaggcgaaagttcttattacatacaggattggggactcccccgaatcaacaaagcagtcactatgacgccattgactgtgaaaggcatcgtctatgaacgcggcataggaactcatgcaatcagccgtatgctctttgatatcggaaaaaaagccaagacgctttccggattagcaggtgcagatgacaataccccatttgcttgtaatcttcagttcaagatattaggagatcggaaagaactatggagaagcggaattatgagaaaaggagatcctgccaaacctttcaatatcgatttatcaggaatagacaaagttttattattggtagaggaatgcggagatggaatgatgtacgaccgcgctgattggctgaatgtcaaattcacaactctcggtgacgtacagcccattcctgtatggcccaagcccattgccaaagaaaaatacatattgactccacaaagtccggacgctccacaaatcaataacccactgacttatggcgctcgtcccggcaatccttttctcatgccaattatggttagcggcaaacgacctatgacctataaagccaaaggacttccgaaaggattaaagttaaaccggaaaacaggactcatcaccggaagcacgaatacaaatggtaactttaaggtccgcctacaagcgacaaatgagaaaggaacagatgaaaaggagatcacactgaaaataggtagcgagattatgcttactcctcctatgggctggaatagctggaactgctggcgatttgcagctgatgaccaaaaggtacgtgatgctgcccgaatcatgcacgaaaagcttcaggcctacggatggacttatgtgaacatagatgacggatgggaagccgatgaacgtacacccgaaggtgaactcccggctaacgaaaaatttccggactttaagacacttactgactacattcactcgttagggctgaaattcggaatctactcttcaccaggttggacgacctgcggcaggcatataggcagctgtcagcacgaattgacagatgcaaaaacttgggaaaagtggggagtagactatttgaaatacgattattgcggttatgctgccattgagaagaactcggaagagaaaacgattcaagaaccatttatcgtcatgcgcaacgctttagatcagataaaacgggatatcgtatattgtgtcggatacggagctcccaatgtatggaactggggagcggaagccggaggtaatttgtggcgaacaacccgtgatatcaacgaccaatggaatattgtaatggcaatcggatgtttccaggatgtttgcgcatacgtatcagcacctggaaaatataacgatccggatatgttggtagtaggcaaattaggaccgggatggggtgcaaaatcccacgattcggacttaaccgctgacgaacaatatgcacatatctccctatggtccatcctttccgccccattattgcttggttgtgacatgactgccatagacgatttcacgttaggtcttctgaccaatccggaagtgattgcagtcaatcaggacccactggtagcccctgctactaagctcacagttcccaacggacaaatatggtataaaaagttatacgatggttcctatgcactcggcttcttccagatggatccctacttcattttatgggatcaggataaagcagtaaatatccagcaacaaaaatataactttaactttgcccttaatcagttgggcatccaaggtaaagtcaaaatcagagacttatggagacaaaaaaacttaggaatattcagtggtagttatgaaacttccatcccctaccacggtgtctccctaattaaaataacacctataaaataaaagcaaatatgaaacgtattctatttattctctttctctgttgtataggtagtggtcttgctgcttgccaagacgaagaccacacggtccctaccctcccatccgggaatgatccggaaataaacgatccagtcgtagaattctatgattgggaaaagaaccgcaccgagttactgacatctacagatatggtgttactttatggcggaggacatcatcgcactccctatacatgggataaagaacgtgtaagttcttatatcagatatgtagataccgacaatcaatcccactggctattcgacagcttcctctttttggaaattatggacacaggtacaggaggcgctaataaaatgttcgccaaagggtacaatctggaatcagccaatcaagcagactggacgaaacttatagactattacttccaatctgaaacaggaatcggagcattagatgcatcagtcaaagaggcctctgccattttgggaaccccacggcagaaacgtcagattgtgatcagtataccagagcccattgtctaccaacacccggaacaagcatcctcatcaaccaagtattgggggaaaattgataaccagacgcttgacttttccaactctgccgaccgaattaaagcctgcaaatggtatatcgatcaggtacgtgccaagttcaatgaaaagaactatcaacatgtagaattagcgggattttattggcttgccgagaaagcgaccgacacccgtgacattttaaatgcggttgccatctacctgaataaactaaaatatagtttcaactggatcccctattatggagcagatggatataatcagtggaaatcactaggatttaattatgcttatttccagcctaattatttcttcaacgaatccgtccccgattctcgtctggaagatgcctgccagaaagcactcacgtatgatatgcacatggaactggaatttgatgacaatgctctgaatagcagaggaaaggcttatcgtttgaaaaactatatgagtgcattcaagaaacatggcatatgggagaaaaaacgccttgcctattatcagggaagtgcatccctacttacactaaaaaaatcagggaacgcagccgatacccaactctatcatgagttctgcaattttgtcatcagccgccccatccggagttcacattagtataaacagtttaatcatcgccattctatgaatcataaatacctatacttactcctgctatttttgatagtcagttgccaacgcaatgtagaaacaggccctcctgtattaaaagaaatgtgccaaagattatttccccggcatgcccagtcgtttctattcgagttactgacagattctattgatacagaccgttttatactggaatcgagtcaagggaaaatacggataaaaggaaacaatcgtaactcattggctgccggtttgaatcattatctgaaaaactactgtcatacccatgtttcctggtatgcctcagagacagtggaaatgcctgatgtactaccggagatacctcagccagtatatatccgttccaaatgtgacaatcgtttttttctcaactattgtacattcggttatactatgccctattggaaatggcaggactgggaacgactgatagactggatggcattaaacggagtcaccatgcctcttgctattaccggacaagaatccatttggtacaaagtatggacagacatgggtttgagcgacgaacaggttcgctcatactttacagggccagcccatcttccctggcatcggatgtccaatgtcgatttctggcaaagtccactacctcaatcctggctaaaggatcaggaggaattacaaaaacgtattctcgaaagagaacgtgagtttgatatgactcctgtattaccagcatttgccggtcatgtaccagccgaattaaaaacaatttatccgaatgcaaaaatctatcagatgagtcagtggggtggcttcgatgaaaaataccgcagtcattttattgatccgatggactcattatactcaatcattcagcgccgttttctggaggaacaaaccaaagtatatggtactgaccatatttatggaatcgatcctttcaatgaagtcgactctcctgactggagcgaggattttttagccaatgtttcaagcaagatttacgagtcgattcatcaggtagactcagcagcccaatggttacaaatgacctggatgttcttctatgacaaaaagaaatggactcaaccccgtatccgttcctttctaaaagcagtaccggataacaaactgatattactcgattactattgcgatcatacagaaatctggcgaaatactgaaaaatattacgggaatccctatatttggtgttatctgggtaattttggcggcaatacgatgatagcaggcaatctgaatgatattgatttcaagattaaacgactcttcaaggagggaggagacaatgtctatggcttgggagcaactcttgaaggctttgatgtaaaccctcttatgtacgaatttgtttttgaccaggcatgggattatcctgtcactaccgaccaatggataaccaactggtccatgtgcagaggaggaaatcaggatgccaatatcatcaaagcgtggagagccttgcatcagaaaatttataccgaacatgccacatgcggccaatcggtattaatgaacgcacgccccagactaacgggaactaaaagttggaatacaaaccccggcatacattacgcaaataacgacttatggcaaatatggaaagagctactaaaagcccggaacatcaacaatagtgattttcgctttgacgtaatcaatatcggaagacaagtactaggaaacttgttctccgaatatagagatcagtttaccgcttgctataaccggaaagatacaacaggcatgagagaatggagtacccgtatggacaacctcttgcttgacgtagaccgcctcctttcctgtgacgcgactctatccatcgggaaatggttacaagacgccagaaactgtggtgcaaccgtgtcggaaaaggattactatgaagaaaatgcacgctgtatcctgaccgtatgggggcaacaggacacccaactgaatgactatgccaatcgaggctggggcggacttacccgaagcttctaccgggaacgttggaaacgtttcacagacggagtcatcgctgctgtttcggaagataaaccttttgacgaagacaaattccaccaggacattacgcaatttgaatacaactggacattacagaaagactctttccctattgtttcagaggaagacccgattcaaatagcagacagtcttatcttaaaatacgatacgtactttaccaaagcacaataatgaaggcggacattcgacaaacaggcgcttcaaaagatacgttttttgaatgtagcttttcgtttttcacagagaagaaagaaatcgaatgtactacctttgttttatcaattatataaatacatactataaaagaccaatttatgggaaacaatcaaccttcggcaagaaaaaaaacttattatatatctctggctattctagccggtatgttcttcatattcggattcgtatcatgggtcaattccatactgattccatacttccgtatttcttgcgagcttacccattttgaatcctattttgtagcctttgctttctatatagcatactttgtcatggccattccttcgggcattctattgaagaaagtaggatttaaaaaaggaatcatgtatggctttatgctgactgctttgggagcctttatctttgtcccggcagctctggcacggcaatttgaaatattcctcatcggcttgttttctattggcaccggcctggctattttgcagacagccgccaatccttatgtcaccattatcggcccgatagatagtgcagcacgacgtatcagcatcatgggaatctgcaataaagtggcaggaattatctccccgctcatattcgctgcccttattctgaaagcaaacgacagtgaactctttgcattaattgaatccggtgcactggacgaagcaacaaagaacgccatgctcaatgaattgatacaacgtgtcattatcccatacattattctgggcatcatcttactgctgacaggtatcggtatccgctactccgtattaccggaaataaatactgacgagcagaatgccactgatgaacaggacaataaacatactgacaaaaaaagcattctcgactttccatacctcatattaggtgcattggccattttctttcatgtaggtacacaggttatagccattgacactataatcaattacgccaactctatggggatggatttactggaagcaaaagtattcccttcttacacactgggatgcacaatgataggatatatacttggtatcatccttatccctaaatacatttcccagaaaaatgcactgatagggtgtacattactaggtttggctctctcattcggagtggtatgggcagacttcgatatgacattattcggtcatcaagccaatgcttccatcttctttctgaatgctttaggttttcccaacgctctgatctatgcaggaatatggcctctttccattcatgggttaggcaaattcaccaaaaccggttcctctctgctgattatgggattatgcggcaatgccatcttacctttggtatatggtcactttgccgaccagtacagtttgcgtatcggttactgggtacttattccttgctttatctatctggtattctttgccatcaaagggcataaaatcaactcctggagataaaactgaacgtaagacattaaaaattaaaaaaatggaaagactgattattatcaatggggaactaatactccctaccggcatcgaaaccaataaaataatggtttgccggaatggtaagatagaacagattgtatcatccgaagcatatattcctcaagctgacgaccggatcatagatgccaaccaacaatatgtctccccaggatttatcgatatacatgttcacggtggcggaggtcatgactttatggatggaaccgtagaggcctttctgggagtagccgaaactcatgccagatatggaacaacagccatggtacctacaacactgaccagcacaaacgaagagctaatgacgacctttgccgtttatcaaaaagccaaaagtcttaataaaaaaggtgcccaatttatcgggctgcatctggaagggccctacttctcgcctaagcagtgtggagcccaagaccccaatcatttgaaaacgcctcatccggacgaatataacacaatactggaagcttcacaagatattgtacgatggagtattgctccggaactggcaggagcaattgaactgggggaaaagctcaatagctgtcacattctcccatccatcgcacataccgatgccatttatgaagaagtggtaaaagcatacgaagcagggtatactcatatcactcatttatattcagcgatgtcaaccatcacccgtagaaatgcctatcgctatgcaggtgtggtagaggcagcttatctgattgatggtatgacagtagaaatcattgcggacggcattcatctgcccaaacctttactacaattcgtatataagttcaagggagccgataaaacagcactttgcacagatgccatgcgaggtgcgggaatgccggacggtgaatccatattaggcagcctgaccaacggtcagaaagttattattgaagacggagtagccaagcttcccgaccgttcggcatttgccggaagcgtagctaccgccgatcgtttggtaagaaccatgataaatatagccggcatacccctaatcgatgctatccgaatgataacccttacccccgcccgcattctgcatgtggattcccaaaagggttctttggaggaaggtaaagatgccgacatcgtcatcttcgacaatcaaattaacgtaacaacaactatatcaaaaggccatgttatctacaatcaatgaaacatacctgtttcaacaagatctattaacagtcaaaatgttcccttctatccaacagatggggaaatgtgctgcgacagaagttactaacaaaatatgcgaacttctcaaagagaaagctgaaatcaatatgatttttgccgcagctccttcacaaaatgaattcttaagtcatcttattcacagtaaacagattgactggagcagaatcaacgctttccacatggatgaatacatcggcattcatccggaagccccacaaagtttcggaaattttctccgtcagcgcatcttcgacaaagtcccgttcaagactgtaaactatctgaacggacaagcagaaaaccttgaagaagaatgcaaacgttattccgaattgctgcttcgtcatcctgtcgatattgtctgtctgggaattggagaaaacggtcatattgcattcaatgatccggatgtagccaatttcaacgactcccatttagttaaagtagtagaactcgacccgatatgtcgccagcaacaagtgaatgaaaaatgctttgaagcattcgaccttgttcctgctaaagcactgactcttaccattccagccttattaaaagcggactggatgttctgcattgtgccttttaaaaataaagccaatgcagtatacaacactctttatggagaaatttccgaaaaatgtccggccagtatattacgcaaaaaagaaaattcttgtttatatttggatcctgaaagtgcagaacgaataaacttataaatacatatgaaaaatatcttatttatcctccttactttcttgtctgtcagcttcagactatatgcgcaggatgtaattaaaataggaattatcgggctcgatacttcccattctacagctttcaccgagctactgaacggagactctgacgataagtttgtcaaagagttcgaagtcgtagcagcttacccttatggttcaaagactatccagtccagttacgaacgaattcccggatatatagaagaggtcaagaaacacggtgtggagattacatcttccatagcggaattgcttgacaaggtagattgcgtcatgcttgaaacaaacgacggtagaatccacctcgaacaagcaatggaagtattcaaatccggaaaaatatgctatatcgacaagcctattggagcgacattgggacaagctattgccatttacgaaatggcggagaaatacaatgtgcctatcttttcttcttctgcactcagatattctccacagaatcaaaagctgagaaacggagagttcggcaaaattctgggagctgactgttattctcctcacaaggtagaaccgactcaccccgatttcggtttttatggcattcacggagtagaaacgctttatactcttatgggaaccggttgcgagtcagtcaaccgtatgtcttcccaagatgctgatgtagtggtaggccgttggaaagacgggcggataggtactttcaggggaatcaaagaaggtccggccatttatggcggtacagcttatacccccaaaggtgcaatagcagcaggaggatatgaaggttacaaagttttgctcgatcaaatactcacttttttcaagaccggagtagctccgatttcgaaagaagaaacaattgagatattcacttttatgaaagcttccaatatgagcaaagaacagaatggcaaaatcgttaccatggaggaggcataccgaaaagggctgaaagatgcacagaagctaattaaaacctacaaataaaaatagcacatgaggtacacatacagacacatcgggatcctgaccatctcattaatagttgcttcctgctctttttcccaaaagcaggcagacaacaatcatgacaaagatatgaatccgaacgtaaaaatagtggtcctcgacccaggacattttcatgccagtctgttgcaaaagaatccgctggcctcagtgaacgacacaattcgggtatatgctcccgaaggagcggaagtcaaacaatatctgaacgacataaatagctataatcaacgggcggagaatcccacatcctggaaagaagaaatatatattgggggcgattatctttccaggatgctttccgaccgtcaaggggacgtagttgtgcttgccggaaacaaccagaaaaaaacaaactatattctggaagctatcaaagcaggatacaatgtgctttccgacaagcctttggccattaacaagaaggatttcgacttactgattcaagcatatcaattggcaaaggaaaggaaattactcctttacgacttgatgactgaacgatatgacatcctgaatatcatcgaaaaagcattactgaacaatccagatctttttggtgaattgcaaaaagggtctttgaatgatccgtcagtttctatggaaagtgttcatcatttctttaagaatgtatcaggcaagccactgattcgtccggtatggtattatgacacagagcaacaaggagaaggtattgcggatgtaaccactcatcttatcgatctggtcaactggcaatgtttccccaacgaaaccatccgttatcagtcggatgtagaagtattgaaagccagacattggcctacccgcattacattacctgaattttcgcaatcgacgcaggctgacaccttccccgccttcttgaacaaatatatcaataataatgtgctggaagttttagcgaatggtagcctaaattacacagtaaaggggattcatataggtatgaaggttatctggaattacactcctccaagtgatggtggcgacacttttacctcccttaagaaaggaagtaaggctacattgaaaacaattcaggacaaagaaagcggttttgtgaaacaactctacatccaaagagctgcagagtctgatcactccgaatttgagagccagttgcaaaaggccatcaaacaactgcaggcgacctatccgttcctatccgtcaaaaaaatgaatgaaggactttatctgattgatattccacaggcggacagactgggacatgaagctcacttcagtaaagtagcagaagcattccttggctatttgcatgataaaaatatgccggaatgggaaaacgagaatacaatatctaaatattatatcaccactacagctgtagagctggcaaagaaagagaaataagaaagaccgcagacacgtgttaagaagtgaaataaaatattatgcagatgaatccatgtttcatggattcattcctcatgttatggggacacgtcttgatatcctgatgattcactccaaccttcccctcctaaacatgctttgggcacatattaccgacgagttagaaaggttggataagatgttgaatcgatttgatgccacaagtgaagtatcaaagctaaacagccatacacaacaagattcagtttctgtcagtgcggaattggaagatatcctacggtcatgccaatattattatgaaaagactcttcatcttttcgacatcacattaaacgatttctcacaaatacaaattcacggcaatcaccatatctcttttagcaacttttccgtaacacttgattttggaggtttcgcgaagggatacgccttaaaaaagattcaagaaatcctcttgcggggaaatatagagaatgctttcgtcgattttggcaacagttcgattatgggaataggacaccatccttatggagactgctggaaagtcagtttgcagaatccttacactcaacaaactcttgacgaattctgccttactgacaatacgttgtccacttccgggaatacggaacagtacaccggacatattataaatccgcttacaggaatctacaacgaacaaaaaaaagttacgagtatcttatcagacaatccgctggatgcagaaatactcagtacagtctggatgattgccgacgaccaacaacgggaacagatcaacgagaacttcaaacatataaaaggaactatatatactctataaaatatgagaaacaaaatagaaaaaggagtcgatttgaatctcagacaattcatcaaaagtctgggatatatcgcaggaggaactgcactgctggcaagcacaccctggctgtcttcctgcacacccgaaaagcttaaagaaatccgcaacgagaaagcccggatcgctttaatcggtactggttccaggggacagtatcatatccacaatctaaaagagattccccatgcccggattgttgccgtttgtgacaattatgctcctaacctccaacaagcagtagagttatgtccgggtgccaaagcatacactgactaccggaagcttttggaatcggcagatattgacggcgtaattatctctactccgttgaactggcatgctcccattgtactggatgccctggcagccggcaaacacgtattctgtgaaaaagccatggcacggactttagacgaatgcaaagctatatatgatgcttatcaaacgaccaaccaggttctctacttctgtatgcagcgtatgtatgacgagaagtatatcaaaggaatgcaaatgattcattccggactcatcggagatgtggtaggaatgcgctgccattggttcagaaatgcagactggcgccgtcccgtcccctcaccggaactggaacatcaaatcaactggcgattgtacaaagaaagctcaggcggattaatgaccgaactggcctgccaccaactggaagtatgcaactgggcagctaaaagaatgccggtaagcatcatcggtatgggtgacattgtctactggaaagacggtcgtgaagtatacgatagcgtaaatgtgacttaccgatactccgacggaacgaagattgcctacgaatcgttgatttccaataaattcaacggtatggaagaccagatcctcgggcacaaaggtactatggaaatggcaaaaggtatctattatctggaagaggaccattcaacatcgggcatccggcaacttatcggacaggttaaggataaagtattcgctgctatcccgacagccggacccagttggagaccggaaacaaaaatggaatacacgccacattttgttattgaaggagacattaacgtcaacaacgggctgagcatgatcggagccgacaaagatggttccgatatcattctctcttctttctgccaatcatgtatcactggagaaaaagcacaaaatgtggtagaagaagcctattgctccaccgtactttgcctgcttggcaatcaagcaatggaggaagagcgacatatccttttccccgacgaatataaaataccatatatgaaattttaaattatgaaagatatcatcatcacctcccaaaaaattaaaagggaaagaaacatttatctgatatgctttcttctctcttttgcaatcaatattattgcaatccttgtctatacacgtccgtggattgaaatattcactcaactggggtatgtgctcgttatcagttttttcatctatttcatactatggattccgcgtatactcattatcgggttacgtcatctccttcgaaaaaagaagtaacagctttacgttttttgaagattgattgacggaaaagaagtctgatatcagttaataacggcttaactttgaggaaaaataaacactatgacaacaagaagagattttatcaaaaaaacagttgcaggcacggccgccctttccttgggaagcattattcccggcttcggttcaaatagttatcaggaaatcctgggtgcgaacgaaaaaatacgaatcggagtcattggtgtaaactccagaggtaatgccttggcacaaggatttgccaagatgaaaggttgtgaagttacttacctttgtgatgttgattcaagagcacttgaaagatgtcaggcagatattcataaaataagcggacgcactcccaaaggagaaaaagatatccgcaaaatgctggaatcggacgattttgaggcggtagtcattgccacgcctgaccactggcatgccaaagcagccattatggctatgcaagcaggaaagcatgtttatctggaaaaaccgaccagccacaatccggcagagaatgaaatgttagtcagggcgacgcttaaatataaccggattgtccaagtcggcaaccagcgccgttcgtggccgaacgttatcaaagcaatagaagagattaagtctggggcaatcgggaaagtgagatatgccaagtcctggtatgtcaacaaccgtccttccatcggcacaggaaaagtggttcctgtacccgactatctggactgggatttatggcaaggccctgcaccacgggtgcccaattttaaagacaattatgtccattataactggcactggttctggaactggggtaccggtgaagcattgaataacggaactcatttcgttgatatcctccgttgggggctgggcgttgattatccgacaaaggtagattctgtcggaggacgttatcgctttcaggacgactggcaaactccggatacacaacttattactttccagttcggcgacgaagcatcctgctcttgggaaggacgtagttgcaacagcacaccggtagacggatacggagtaggtaccgctttctacggagagacaggcacccttttcatcagtggaggcaatgagtacaaaataacagacttacaagggaaagtaatcaaagatgtaaaaagtaacttgaagtttgaaactggtaatttgctaaatccatcggaaaagctggatgcttatcatttcgaaaactggtttgacgccatccgcaaaggtggtaagctgaattccggcattgtagatgcctgcatcagtactcagttagtacagttaggcaatatcgcacaacgtgtaggtcattctttaaatattgatccggggagcggacgtattctgaatgatctggaagctaacaagctctggggcagagaatacgaaaaaggttgggaaatacgggtataaccccgcccttctcttcctcgttttttcattaggttatagttttgttggagggtatgtcaaaagtaactaaactcccctccttcgggaaggaggggtggctgaaagccggggtggtaggtgtactgtacaattgaatatcaatagtttatgtattcacctaccacctccccctacggggactcctccttcctgaaggaggagaattttgttactattgactctgacacacgctccttctttgtatcataaagcgaacagagtttatgttatcatatttcaccatataagcacatccgtggcagagatactgcaacaccccgaccaagctcccatgaaaaacttcaaccttttatttataaaccagacaaacgtttctaataaattcctgcatcgtttattataaacgtcctcccagtttattataaactcaaattccccttttcaaagattaatctttaattttatgcaacaaaaaaggctgcaaacccgctaagagttcgcagcccatcaatgacaaatgagtctcacagagtctgttttctcagacttccgttctttatattgtcagtatatcataccaaattaaaggcatatacttcctatcagatgcagcaaaaaacaattcttttttcattggttcaggttttaattaaagcttgatagccgactacaaatatacaacataaaaagggctttgtcaagtcttcgggaagtttacacaagaaaacaaaggatgaacgaagctgtcagcatcataaaaaacgtgagttcttttcgtcctcatattgaatttatttcgtatttttgcgtgcacatcctcctttttttgatggatagaagaaaatttgttgttaaagcaaagcgaagattgatatatgagtgacgaaatcaacgagataacggaaggacattcagactacaaaccggcggacgcgcgggacgaaaacgtaaagcatcagttaacaggcatgtaccagaattggtttctggactatgcttcttatgtgattctggaacgtgccgttccccacatcaatgacggtttgaagcctgtacaacgacgtattctacattccatgaaacgtctggacgacgggcggtataacaaagtggcaaatattgtgggacacaccatgcagttccatccgcacggtgatgcttctatcggcgatgcactggtacagttggggcagaaagacctgctgatagactgtcagggtaactggggtaatatactcaccggtgacggtgcggcagctccccgttacatcgaggcacgcctttccaagtttgcgctggacatcgtattcaatcccaagacgaccgaatggaagctgtcttacgacggcagaaacaaggaaccggtcaccctccccgtgaagttcccgctattgctggcacagggagtggaaggtatcgccgtcggactttcatccaagatattacctcacaacttcaacgaactttgcgacgcctccatcagctatctgcgtggagaatcgttccagctatatcccgacttccagacaggcggttccatcgacgtagccaaatacaatgacggagaacgcggcggagcggtaaaagtacgcgccaagatcaacaagctggacaacaagacactcgccatcacggagattccgtatggcaagaccacctctaccgtcatcgactccatcctgaaagctgttgacaaaggaaaaatcaagatacgcaaagtagacgataatacagccgccaacgtagagatactggtacacctggcacccggaacttcatcggacaaaacgatcgacgcactgtacgcctttaccgactgcgaggtaagcatctcacccaactgctgtgtgattgatgacagcaagcctcacttcctcaccgtcagcaaggtactgataaagtcggcagacaacacactgggactgctgaaacaggaactggaaatcaagaaaggggaaatactggaatcactccatttcgcttccctcgaaaaaatatttatcgaagaacgaatctataaggacaaagagttcgagcaatccaaagacatggacgccgcctgcgcacatatcgacgaccgcctgactcctttctacccgagctttatccgtgaagtgaccaaagaggatattctcaaactgatggaaatcaagatggggcgcatcctgaagttcaacaccgacaaagccgatgaactgatcgcccgtatgaaagaagagatcgccgaaatcgacgatcacctcgctcacatcgtggactataccgtaaactggtatcagatgctgaaaagcaaatacggaaagaacttcccgcgccgcactgaactgcgcaacttcgacaccatcgaagccgccaaagtggtagaggccaacgagaaactctacatcaaccgtgatgaaggatttatcggaacagcactgaagaaggatgaattcgtagccaactgttcggatatcgatgacgtgatcgtcttcttccgggatggtaaatatatcgtcactccggtagccgacaagaagtttgtgggcaaaaacattctttacgtcaatgtattcaagaagaatgacaaacgcaccatctacaatatcacttaccgggacggcaaagaaggaacgacgtatatcaaacgttttgccgtgacaggtgtggtccgcgaccgtgaatacgatgtcacgcaaggaacgccggactcacgcatcacttatttcagcgccaacccgaacggagaagccgaaatcatcaaagtgacattaaagccgaacccgcgtgtaagacgcatcatcttcgaacgtgatttcagtgaaatcagcatcaagggacgtcaggcacagggagtgatcctcacccgactgccggtgcataagattaccctgaaacagaaaggaggctctaccctcggaggacgaaaagtctggttcgaccgcgatatcctgcgcctcaactacgacggacggggtgaatatctgggagaattccaaagcgacgacaccattctggtagtgctcaacaatggcgagttctacaccactaatttcgatttgagcaaccactacgaagataatgtcagcatcgtcgagaagttcgacccgaacaagatatggactgccgcgctttatgatgccgaccagcagaactatccgtatctgaaacgtttctgttttgaaggttccaaccgcaagcagaactatctgggagacaacaagaatacccgtctgatcctgctgactgatgagtactatcctcgtctggaagtcatattcggcggacacgatagtttccgtgaagcgatggtaattgacgcggaagaatttattgcagtcaaaggcttcaaggcaaaaggaaagcgtatcactacttatacggtggataccatcaacgaacttgaaccgacccgtttcccggaaccgactaacgaacaaccggaacaaccggaagaagaaccggaaaatctggacccggacagcgataagagcgaaggggacatcatcgatgagattacgggacagatgaagctgttttagctaatgtatacatgcggtaaaaaatacccaatgtgccaatgaagaaaaacttattatacttagggctgacaggatacctcctgttcgccctctgcacaagattacaggcgcagaccgacagtctgcaagcacatcgctacgtaacacgtgccaccatgtacggagtcggatttaccaatgtgttcgacacctatctttcgcctcaggaatataaaggaatagatttccgtatttcccgcgagacgatccggatgacaaagttgttcgacgggaatgtttctgtgcagaacttctttcaggcagacgtcggctatacacacaaccgcgcagacaacaacaataccttctccggactcgtcaactggaactatggcctccattaccagttccgcctcaccgagaacttcaagttactggcaggaggactgtttgacgtcaacggaggatttgtctacaatctccgcaattcgaacaatccggcttctgcccgggcatacgtcaatctggacgcttcgggaatggctatctggcatttgaaaatcaagcgctatccgatggtactccgctatcaagtcaacgtgccgatgatcggacttatgttctcaccgcactacggacagtcttattacgaaatcttctcactgggcaactccagcggagttatccaatttacctctctccacaatcaaccgtctctccgtcagatgctttctgtcgatctgccgataggatataccaagatgcgtttcagttatctggcagacttgcaacaatccaatgttaacggaatcaagacacatacctactctcatgtatttatggtaggatttgtgaaagacctgtatcgggtttccaacaaaaaaggagcgaatctgcctccgtcggtgagggcgtactaggagaagtggagagtggagaatttatggacaagaactgaaagattaagaatgagaaatagaattatacaactacttttactgctctgctgcctcccgatacagacggggtgcatcggagaagatgattacgctgatgatcccgtaggaaacttcgagcaactatggaagatcattgacgaacggtattgctttctggactcgaaaggtattgactgggatgcggttcatgagaaatacagcaaactgattgtaccgggtatgtccaatgacgaccttttcgataaactcagcgagatgctctatatcctgaaagacggtcatgtcaatctttcatctgccaagcgtgtctcttattacgacgcatggtatcaggggtatccgtggaattatcgggaggatattctttaccagtattacctgggcagtgccagcaaggactactatacatcggcggggatgaagtacaaaatattcgacaataatatcggatatatccgctacgaaagtttcagttccggggtcggcgatggcaatctggatgaaatccttgtctatctggcaacctgcaacggactgattatcgatgtacgcgacaacggaggaggtaatctgactaattcttcccgcattgccgcccgatttaccaatagtaaaatcctgaccggattcatacagcataaaacgggaacaggacatagtgacttttcccaaccggaaccgatctacctggaaccttccaacagcatccgctggcagaagaaagtcgttatactgaccaaccgccgttgctacagtgcaaccaatgatttcgtcaatctgatgcgcagcatagacaatggcaagatcatccaggtcggtgaccagacaggtggcggttcgggacttcctttcacatcggaactgccgaacggatggagcatccgcttctccgccagtcctcatttcgacaaaaatatgcagccgctggaagaaggtattttgcctgatatagctatcgatatgactgaggatgaccaatctaaacatagggacacactgattgaaaaggcttttgaaatcttaagtgagtaactttgttgcctaattatttgtcaaatcagaaaatcttcctatctttgcaccgctaaacaaaaagcgacgcatgcggatgtggcgtaattggtagccgcgccagacttaggatctggtgccgtgaggcgtgtaggttcgagtcctatcatccgcacacatttatataaactagaaagccttcaagaaatatcttgggggctttttaattgattacatatatgaagaaacatcaactttgctgcatcggccatatcactttggataaggtagtcactcctcaaagcacagtctatatgcctggaggcacagctttctattgttcacacgctatccgccatttcaatgacatagattatgcattagtgacagcagtcggcgctacggaaatgaaagtagtagaccagctgcgcgggataggcatcagcgtaaccgcattacccagccagcactctgtatacttcgagaacatctatggagaaaatccggatgaccgtacacaacgtgtgttggctaaagccgatcctttcaccgcttcccagcttcaggagatagaggcggaaatttatcatcttggttcgctgttagcagatgatttttctttagaagtgattaaggagttatcccggaaaggattgatagctgtcgattcgcaaggatacctgcgtgaagtacgtgatacgcacgtatacccggtagactggactgacaagcgggaagctctgcaatatattcatttccttaaagtaaatgagcacgaaatggaagtgctcacaggactttccgatccgcatgaggccgcacgtaaactgcacgaatggggagtgaaagaagtattagtcactttaggaagtatggggtctctcatttacgacggtacggatttttatcgcattccggcttataaacccggacaagtagtagatgcaaccggctgtggagatacttatactatcggatatttgtatcaacgggtatcgggtgcgagcatcgaagaagcaggtcggtttgctgccgccatgtctacgctgaagatcgagaaatccggtcctttctgtggaaataaggaagatgttattcgatgtatggagactgcggagcagatgtactaaaagagagccatacaggcgttaatatcaataagcagagcgctgttttatcttgaaaaaggatgaaacagcgctctgtttattaactacttttttctcctgttcttaataagttgccctagaaaaacaccactcattgtgaaaatcattgcaatggaagccgagaaccaacgactactttccgtacataaaagaatggtaaagagtcccaataatagaacaaagaataatgccaatttaatattacctttcatgtatcttcgaacgtttaaatttaacaatcaggaaatagacactttgaaagaagacgccaataaatatcattttcagaccatcaacatcaaacatacgttcacacagaactccgacaatctttaaagcacaaagtactgcaatgattaatgtgaaagcatattgtaaggcagcatttcttatctttaaatattcagcacttgtttctttacagcaccaaggaaaaagatacaccaaattaaagccaacaaaaatagataccaaagtatcatattcaaagggtactacgaatatctcatatattccccaaagaataagcagtataataatcatcacatctggcctattttttttcatgaatttcattgttctatttttatttattattcagactgttcgtatacctttcagctaaaccaagctttatctcaaaagtaataaatatctttcaaggttcactctatccagctaatcttttgacctaagatgttcaatagcagaaaactagtcctaactgaaaatcaagacgtctcatatagagtctatccaatttgtttggacgtagtgtttcctttttctcatcggctgtcatttcaatcttcttaaagtctccacttaaaacagaaaagcctccgtttaccgcaaggtggtctgtcaatttatattctaccagaaagtccatattcccggccaatgcaccggaagtacatttaaattcactattacttcgaccttcatcccgataatgtagatatccggctcccaatacgcaactaattaaagttctttcggttattggaattttgaatccaagttgcggtcctaaataccaaagttctacattgtcagctacattcgtttcatcatcaagtgtataattggcagaagtaccggagagattaaactttaatccggcaacccaaaatttatcaattcgatagagtgtcttcacattacacgtcaagcctccattatattccccacgataattaacaccaaaaggtgacaagtttgacttaccgaacaatacaccttttccaccatctaccgaaataaacagtttatctccggaaaaactctgtgcaaatcctactgtaacagaaaacacaaataggaaaaataaaataagttttctcataatactatatttgaaaagtcgtatgaattgaaatattctaattatcaattcatacgactaattattttatgttttttctctagtgatatagatatacaatatagaacctaaagctagaactagattcatcagtaaaatatatgtcactttattggggttattatcaaaaaagaaataaatgcataatgaaattatgatagataataaaaacagtcctgatagaacccataatttgtcagtactagcatgaaatcgttttcttttcttaataagttgtcctatgcaaactcccgttgatgtacaaatcattgcaatagaagcagaaaaccaaatactattttctgtacataaaagaatggagaacagacctaatattaaaatataaaacaatgctaatttgatattatttctcatttactgtacatattaaataattatcaacgcaggggcaatagtttacctattgtgtctctcgctatactatcatcatctctttccatcggcttaaattctattgtatctatttgtatttccgttggagggcgagagactacacgggagctacatagccaagtttgtaacacacaccaaccaaccgccacaacaaatcccgcaccagccgtaaccattccaaaagcggttgaccataaagcaccagccaagccaagagatacattgcacccccaatttccaccacgggctgtcagaccgtcaagtccatcatatatttcaagaacattacatgtattatttcttttattaaccattgctttaaaaataggaatattgttactatcataacatgtgaacatagtttcttcaagtgcatcttcagcattttgtgcacattcaattataagacagttttcaataacaccattctctttataaaatgccattatattattagcatccattttacttcgtacaactatcatttcctccccaaaggtttggatttgtggacgcaaaatttcttgcatacctaaatcgtaattcatttcagcattattaaaagtagttcttgtttttaccgaattattcaagtaatccagtagttgttgtttcaattctaaactactcactttttcaaaagtcttattctcaataacattctgttcttctgaaagagtattttgctcatccgaacatgataagcagcaaatacaacataataaaaacataaaaaaaattgctttcataaccgattgaatttaaaggttgataaatacgttacaacaataataaataacagatcccaaaggaaattacctccttcctctaacttaatattttacaattagaaatatcgactatacagaaaaggaacacaaaaagttacttcttgtcactaagactaaaagtacatttatccattaccttattcagttcagtttcactgtacagtaaatgtaccttccaacaaacaatcattcaaaattatatgaatagtatattctcctttttcacaagaagacatatcaatcatgacaatgctagtgttgtgataagttttggaatgtacaatttcacctgtagctttattcgttacagtaatgatagcataatcttttgctctaccgaagcttacattaagaatattagagagaatagcacatttctcataagtaggttgaataggtattcccataggattagagcggctatcttttagtaaatgaatatcatttgaatttgcccatccttcaatcgcaaataagcaacaaagtaataataatagttttgctttcataatacttatttttattggttatgatacaaatgtaagggataagatttaaataaattcagatgcctggtcacaataaagttacaagataactatggatctcgactgcaagttacagaaaagttacaggaatgtcacaatccaacataaacacctatgagacaagatattggcgtatagtcatccattcaaagaattcttctcctaacttaatcttcatgcgacttttccgacttttaaatgctccttcagaagcacgtgtacataataagattgtttctttggagcaacccaataagaaaaatacgcaatggagcaagtcttctttagttaaatcagcatattgaattttcaatttaagcataatgtcgccaaaagtttcataaatgctttcacaaatcatctgtccttcatgaatactcaaagaggtagcaacgcccatctttttctccaaagaaagaagtttctcatgggtttctgtccttcgaaacaactgaagacaaagttctaaactcggctccaacatcctcataaaatcagattcagcattaccctgatcctcaaagtccccagatagaatatctgtacgactcttcattaattgattttgtaactcaagatacttcttttttcgacgtttatcaatccaaagagaaatcgctcctccaataataaataacagcaaaagtgataagacctcaattttatatcttcccgcaattttttgctgataaaattcgatttcatattgatcagccaaacgagttatctcagctgcctttgttgtatcataaattgaatctagataataaataaaagaatcagctgccgctatagctgctggataatttttctcttctttctccaatttatataattctccataacttcctccacggttaaatatataaggagaagatttactcaaattcaaataataccgtgcagagtccatttgatggatattacgtaagatacaaccttttcgaagatattcagaaaataaattagtaccagttggtgcagaagatatagatgcagaaagatattggttagccttttgaaattcccctttttcattatgcaaaattcccaattcactcaatattatagatttataataatcttcccctatattctctgcaacatccaatgctttttgataatagaccaaagcactatccaattgatgttgaagcataaaaacataccctatccctctaacagcataaaatagaccatcatctttcttttgcttaatataaatttcatgcgctttatgatgggcgtgcatagcatccttataaagattttgttccgcataacatcccgccagattctcataaatggcccccaaataaagatactcgctctctttaggaattacctttaatgcttgcaagaaatcttttaccgccaaatccatacaccgcatgtctcgatacacacaaccccgataataataggcttgcatcttacgctcattattccaacttcttttataataatctactgcaaaccgaatcaatgaatcacttgactcatgaacatacaacttagtccttgcccgtgtcaaaaatatagcataatcagctctttcagagccggataacttttcaggatgagaaatggattcgaggagagacagggcactatcggggaactcttgcatcagtgagtctgcctgatgtaaaagagtagttgcattacctccatcatgacaagcagagagagacaaaatcaggaacaaccctataatataagaaagaagtagcttcatagttcgtttcgttttacaaatgtaaatagaataaaacaaacaagcaacaaaaagacaaataattttttcacacatcataattacaatgttaaaattgccctttctctctctttccctaatcttttttgcctttcatttgttcactttgttactttcgccggaagacggcagaataaacttcaacctaaatagtaacgaatggaaaaatttaatgcaatgaggactagacttttacaagatcttcagaagaaaaccatcaggtttaagagcatagtggcgctcacttgcttgttgctgacctccgtatccgcctttgcacaaacaaagacagtgaccggtacggtaacagatgccgccaatgaaccgctgatcggtgcatcggtgctcgtacaaggaacttccaccggaaccatcaccgatatggacggtaagtattcaatctctgtcaccccagaagacgtactggtattctcctatgtaggaatgactacacagagtgtcaaggtaggagcacagaatgtgatcaacgtcaccctgaaagaagattcgcaggtactagccgagacagtcgttatcggatacggtagcgcgaagaaaagagacttgacaggttctattaccaacgtcaaaggagaagaaattgccaacaaacctgcaacgaacccattatcttccttacaaggaaaagtggcaggtgtacaaatcgtaaactccggacgtgccggtgccgaccccgaaatccgtatccgtggtacaaactccatcaatggctacaaaccgttgtacgtggtagacggactattcaatgacaatatcaacttccttaatccggaggacatcgaatctatggagatcctgaaagacccgtcatcactggctatcttcggtgttcgcggtgcgaatggtgtcatcatcatcaccaccaagaaagccaaagaaggacagacactggttaacattaatacctctttcggtttcaagaaagtagtagataaggttgatttggtcaacggtccgcaatttcaggagctatacagcgaacagcttgccaatcagaaggacactccgttcgacttcagcggctggaacgcgaacaccaactggcaggatgagattttccagactgcattcatcaccaacaataatatcagtattaccggagcttcgccgaaacacagtttctatctgggcgtaggttactctcacgaacagggaaacatcaagcatgagaagttcagtaaagtgaccatcaatgcaagtaatgactataagatcacggactttctgaaagtcggtttccagttcaacggagcacgcacgcttccggcagactccaaacaggtgctcggcgctcttcgtgctgcccctatcgcaccggtatataataaggaatatggcttatacagtgttctgcccgaatttcagaaagcacagatcaacaatccgatggtagacgtcgatctgaaagccaatacgaccaaagccgaaaactaccgggcatcgggtaatatctatggcgaagtggacttcctgaaacatttcaacttcaaagcgatgttctccatggactatgcttccaacaacggacggacatatctgcctgtcatgaaggtgtatgacgatactgccgcaggagatgtagttacattgggaaccggcaagacagaagtcagccagttcaaggaaaatgaaacgaaagtgcagagtgactatctattgacttacaccaatagttttgatcacggcaatcataacctgaccgctacagtcggtttcacgacgtattacaattcactgagccgactggacggagcacgcaagcaaggtgtcggtctggtgattcctgacgatccggacaaatggtttgtcagcatcggtgatgcagcaacagctaccaacggaagtacccaatgggaacggactacggtatccatgctggcacgtgtgatctacaactacaaaggaaaatacctgttcaacggttcgttccgtcgcgatggttcttccgccttctcatacaccggcaatgagtggcagaacttcttctcactaggcggcggttggttgatgaccgaagaagagttcatgaaggatatcaaatggctcgatatgttgaaaatcaaagcatcttacggtacattaggcaatcagaatctggacagggcctatcccgccgaaccgctgttgtcaaatgcttactcggctgttttcggcaagccgtccattatctatcccggttaccagctctcctatctgcccaatcccaatctgcgttgggaaaaagtagaagcttgggaagcaggtttcgaaacgaacgtgctgcgcaaccgtctgcacttcgaaggagtatattataagaagaggaccaaagacttgcttgccgaagtgcccggtatctccggaacagtacccggcatcggcaacttgggagaaatcgaaaacatgggtgttgaaatggcagccagctggcgtgaccagatcggtgactggggatactctgtcagcgccaacctgaccaccatcaagaataaggtgaagagcctcgttcaggacggatactccatcatcgccggagacaaacagcagagttacacgatggcgggctatcctatcggtttcttctacggttacaaggtggcaggcgtataccagtcgcaagccgacatcgatgcatcacccgaaaatacccttgccacagtcactcccggtgatctgaaattcgccgacgtgaacagagacggtaagattaccccggaagaccgtacaatgataggtaacccgacaccggatttcacctatggtctttctctcggagtaaactacaagaactggtcattgggcatcgatatgatgggacagcacggtaacgaaattttccgtacctgggacaattataactttgcacagttcaactatctgtcacagcgcatggaccgctggcacggagaaggtacctccaacagccagccgttgctgaactccaaacattctatcaacaacctgaattcggagtattacatcgaagacggcagcttcttccgtatccgtaacgtgcaacttgcttactcgttcgacaaggccctccttgccaaaatacgcttgcaggcactgaaagtctatgtcaacatacagaacctgaagacatggaagcacaacaccggctacacaccggaactgggaggtagcgccaccaccttcggagtagacgacggcagctaccccgtacctgctgtctacactttcggcatcaacctgaccttctagtggcgtggcaaggtaccacacccaagtttccatgcgggtggcaaggtgccacagccaggtttccatgcggaatataactttaatgaatcaaatctataattgtatgaaactaaataaatatcttttttccacctttattgccgcttccgctctgctgataagcagttgcagcgactttctggaccggagtccgcagggacaattcaccgaagacgataatcccaatgcgctggtcaacggtaaaatctacaatgtctataccatgatgcgaagtttcgacatcaccgccggtactcccgccattgctatccattatctacgctccgaagactccgagaaaggaagtattccgagtgacggatcggatgtagccgaaatgtacgatgacttcttatacaccccgaccaacggtttgctaggttcatactggggaaagaattacgccatcatctaccagtgtaatgatatcctcgacgccattgccgagaaagagactgccggacaaacagaaaccgaagatatcatcaacaaaggggaagcttctttcttccgtgcttattgttacttcaatctagtgagagcttttggcgaagtacctttggtgacttacaagatcaacgatgcctcggaagccaacatcccgaagactaccgccgataaaatctacgagcagatcgataccgacctgaaaactgcggaagagtcattgcccgaaacatggagcaccgaatataccggacgcctgacttggggagctgcccgttcacttcatgcccgcacctatatgatgcgcagtgactgggacaacatgtacaaagcctctacagacgttatcaacaaaggtttatataatctgaaaactccgtataacgaaatattcaccgacgacggagagaacagcggcggttctatattcgaactgcaatgtaccgccactgccgcccttccacagagtgacgttatcggcagccaattctgcgaagtgcaaggcgttcgcggagccggtcagtgggacttaggctggggatggcacatggcaacccagttgatggcagacgcctacgagacaggtgacccgcgtaaaaacgccaccctgctctacttccgcaaaacggacgatgaaccgatcaccccggaaaacaccaacgaaccttatggtgaatcccccgtctctccggctatgggagcttacttcaacaaaaaagcttataccgaccccgcactgcgtaaggaatacaccaacaaaggcttttgggtgaatatccgcctgatccggtattcggatgtagtattgatggctgccgaagctgccaacgaaaagaatatccccggagaagcggtggattatctggaaatggtacgtgcacgtgccagaggcaccaatacgaatatactgcccaaaataacgaccaacgatcagggagaattgcgggaagccatccgccacgaacgccgcgtggaactcgggctggagcccgaccgtttctacgatcttgtacgttgggggatcgcctcggaagtattgcacgctgccgggaaagtaaactaccaggataagaacgcattattgcctttgcctcagtcagaaattgacaagtccaaaggagtactggtacagaatccggattattaattaatattcaaatcaaactgatagaacgatatgataaataagaaaatatttttttcacttctgctgctcgctgccggcttcctgagtgcggcagcgcagaagtcgccacaagacatggaccgcttcatcgacgcattgatgaaaaagatgacggtggaagaaaagataggtcagttgaacctacctgtcaccggagaaatcactacgggacaagccaaaagcagcgacatcgccgccaaaatcaaacggggcgaagtaggaggcttgttcaatctgaaaggagtagaaaaaatacgcgatgtgcagaaacaggcggtagaacaatcccgtctgggcatccccttgctattcggtatggatgtcattcacggatacgaaaccatgttccctatcccgctgggattatcctgcacctgggatatgaccgccatagaagaatcggcacgtatcgcagccatagaagccagtgccgacggtatctcatggacattcagtccgatggtggacatctcacgcgaccctcgttggggacgtgtttccgaaggcagcggtgaagatcccttccttggagccatgattgccgaagcgatggtactcggttatcagggaaagaacatgcaacggaatgacgaaattatggcatgcgtaaaacactttgcactgtatggcgcaggagaaggcggacgtgactacaatacggtagacatgagccgccagcggatgttcaatgaatatatgctgccttacgaagcggctgtagaagccggtgtaggtagtgtaatggcttcgttcaacgaagtagacggtgtgcccgctaccgccaacaagtggctgatgacggatgtactgcgtggtcagtgggggttcaacggatttgtggtaaccgactataccggaatctccgaaatgatcgaccacggtatcggcgacctgcaaacggtttccgcacgtgccatcaatgccggagtagacatggatatggtgagcgaaggctttgtcagcacactcaagaaatccattcaggaaggcaaagtttctatggaaacactgaatactgcctgccgccgtatcctggaagcaaaatataaactgggattgtttgacaatccctacaagtactgcgacttaaaacgtccggcacgtgatatctttacgaaagcgcaccgagacgctgcccgcagaattgccgcagaaagctttgttcttttaaagaatgacaacgtgaccctgcgtccgggaactcctgccgaacctcttcttccttttaacccgaaaggtaacatcgccgtgataggtccgttggccgacagccggaccaatatgccgggtacatggagcgtagctgccgtactcgaccgctgtccgtcactggtagaaggcctgaaagagatgactgccggaaaagcaaacatcctttatgccaaagggagcaatctgatcagcgacgcctcttacgaagaacgcgccacgatgttcggacgttcactaaaccgtgacaaccggacagacgagcaattgctgaacgaagcattgacggtagccaatcagtcggatatcatcattgcggctctcggagaatcttccgagatgagcggagaaagcagtagccgtacagacctgaatattccggatgtacagcaaaacctgctgaaggagttgcttaaaaccggaaaacctgtcgtactggtattattcacaggtcgtccgctgacgctgacttgggaacaggaacacgtacctgctattctgaacgtatggttcggaggcagcgaagctgcttatgccatcggcgacgcactcttcggatatgtcaatccgggtggaaaactgacaatgagtttcccgaagaatgtcggtcagattccgctgtattatgcacataagaatacgggacgcccgctggcacaaggcaagtggttcgaaaagttccgcagcaattatctggatgtggacaatgagccgctttacccgttcggatacggactgtcttatactaccttctcttacggcgatatcgacctgagccgttcgaccatcgacatgacgggagaactgacggcagcagtaatggtcaccaataccggcacatggccgggatcggaagtagtacaactctatatccgtgacctcgtcggcagcactacccgtccggtgaaagagctgaaaggcttccagaagatattccttgaaccgggacagtcggaaattgtacggttcaagattgcaccggaaatgctgagatattacaactacgacctgcaactagtagcagaaccgggtgaatttgaagtaatgatcggaacaaacagccgggacgtgaaatccgcacgattcacgctaaaataaaaatcgtacaataggcatggattacacggattcacacggtctttaactgcgaaatctcttaaaaccgtgaaatccgtgtaatccatgcctaaattttattctctcatttaaatccacaatcaatgaaaaaactatctctctatatttcgctcctctgcctgatactgacagcaggagcctgcaaaaacaagaccggcggaccagccaccgccagttccgagctcacggacgatgccttgatggacaccgttcagcgccgcacctttctctacttttgggaaggtgccgagcccaacagcggacttgcccccgaacggtatcatgtagacggggtatatccgcagaatgatgccaatgtagtcacttccggcggcagcggcttcggcatcatggctatccttgccggaatagaccgggggtacgtcacccgcgaagaaggtctggcacgaatggagcgcatcgtctccttcctcgaaaaagcggaccgttttcacggagcatatccgcactggtggtatggcgatacgggaaaggtgaaacctttcggacagaaggataacggaggtgacttggtagaaactgccttcctgatgcaaggactgctcgccgtacaccagtattacatcaacggtaatgagaaagaaaaagcactggcagcacgcattgaccaaatatggaaagacgttgactggaactggtaccgcaacggtgaccaaaatgtgctatactggcactggagccccacctatggctgggaaatggacttccccatacatgggtacaacgaatgtatgattatgtatatccttgccgcagcctctcctacccacggagtaccggcagctgtctatcacgatggctgggcgcagaacggagctatcgtctccccacataaagtggaaggcatcgaactgcatctccgctatcagggcacggaagccggaccgcttttctgggcacaatactccttcctcggactcgaccccgtcggtctgaaagacgaatactgtcccagctacttccacgaaatgcgcaatctgacattagtgaaccgtgcttactgcatccgcaaccccaaacactacaaaggtttcggaccggactgctggggactgactgccagctattccgtcgatggatacgctgctcattcaccgaatgaacaggatgacaaaggggtcatctctcccaccgccgccctttcatccatcgtctatacaccggaatattcgatgcaagtgatgcgccacctgtataatatgggggacacagtcttcggtcctttcggattctacgatgctttcagcgaaacagacaactggtatccgcaacgttaccttgccatcgaccagggaccaattgcagtcatgatcgagaattaccggacagggctgttatggaaactcttcatgagtcatcccgatgtacaagcaggacttaccaagttaggtttcaataccaataagcaggatgtaaggcagaaataaagaaatcacagcgtgcgtggaagtggtctactgaccacctcctccacctgtattcccaccttcgccgccaccacctttcacatcgtcattattgatgcttcgggcagctttcttcacactagctttcagttcaccaatccggtagctgatgctgactccaaagctacgactcggccacttgctgctgctcttcgacaggaagtttacgccttccgtatgattgttatagcttctgtatttctcaaatatattactgcaatacacattcaggctcaaacgctcatctttcaggaaagaacggctcgcacccaaactataataataatagccagaaccttttccctgtagattaatataaggagtactaccaccaccattcagacttaaccgtattttcaacggaagagtatgctggacgccaccatagaaagaaccgttccatccataattgtgcaatccctgcgcttcacttttcaagtcgctgtagtttccacggccattgacgtataggcgcgttttaggagatgcgttccagttcagatacaggctcattcctgtgttccggctctttcctatattggcataagtgctgtacaaggctccttccggtgctatgtgcgtaggatcattgtcaaacatctccccttcaggcgccgtaatcaaccggcttatattctcaatactgttattgttgaaagaatggcgcagcgacacattgatattgaacttcgcactaaaattgctataagacaagtcgaacgcatggcttttttcacttttcaggttcgagttaccttgggtgataaacatcggattcagattattaaaataaggattcagattccagatgcccggacgccagatacgcatattataacctgcacgcatattctgagtcttgccaagcttcatgccaagagagacggatggcaccaggtcgctgaagttcgtgtgaaaattctcacccggtccaacgatatatttcacccgttgcacagtctgttcatagcgcactcccggcttgaaggtgaaatccttatatttcaatgtatatccgagataagcggccaggatatgattcaaatgacgatagtcgctgctgcggtcttcgttatataaataatcatcacttcctccggctgcttcataaagtttgttgtcactggtattgcgacggaagatatatttcgcacctgcctccacggtatgcaactcacctatcggagtcgtatagtctacctggaaggtctgttccatcgtattggttttgccgtccgactggctgtttttcaacagcaaccgtttcacgaggtcgtccacctcctctttggcgtgaatatcttcatagccagtattagaattgcttgtctgaggctgcgtattgatcttataggagaaagtgatcatccgctgcttgttctttctggacgtgcgctgatagtcgatgtttccattgatggaataccaggagccatctccatgattgccggtccgatagctgtaggctatgtcctcatggttagcaccatacatggtggtaaatccatcaccataatttttactattgctgccatacattccaaaagccaccgtcagcagccttaaggtgtcgatctcataactgccttccaggtttccatactggaagttgcctttcgacttggaactgctatttgattcaagatatttttccgtatccgactcatagttctcacggtagctgtccgaatatccacggggccggtcattgtaattaaagttgtaattggcagagacagtcattttcccctgcttcaccattgcgtagccgccggcaccggcaccgtagttgctggcatttgcccggaatgttgccgtatatccttcgaatccaccacctactgttacgatattcaaaatacctcccactccttcagcgtcatatttagctccgggcgatgttatcacctcgatatatttaatggaattggcgggcatactcttcaacacctctttcgggttgttgctcatcatattgttgggcttcccgttgacgtgtattttaaagctactgctaccattcacctgtatgttgtcttctccgtccactgtcactaaaggcacttttcgaagcatctccaatatactgttcgatttcgagtcggggtcatcctcaatattatactctatcttgtctacatccaccttgaccaaaggcttttgcgccacgacttccactcctttcaattcattattagcctcagcggagagcattgtccccaaatcaatgactctaaccgatggtttcaaagtgaactctttcgtgacgggcgccttgcctatcgaagaaatagtaatgacgtaatctcccgcacctacattcagtttctcctgaaacctaccattggcacccgtcaccgccatcttgacagccttgtccggtgctccttttttagtaatcttaatagtagcgtatggttctccatcctgagtcagtgaatccaaaagtacccctttgacagtataggacggcatagcggagttttgtgcccaacctgtcatcactgcggtgaacacgaatagtaatagtagcaacaatctgtgtttcatgtttggaatcgttttagtttttagtttattagacgaagtttctttcaatttcttacaaatacggggtaaaagtagatggtttctttatggttacgaaatcttcggagttaagaatcgtaaaagaagagataaaaaagattatacgaaaagagaaaccgatttctaggtcatagaatggcagaggtctttcttggctgcacattataaatacatcttcaaaatcttaagaacaacggcataattgaataaaggttttctctgtagaaaataacgtcaccgcattcataaattaattcgtccggctataggcatcttttcgtccgcctatagccggacgaaaggttgcctataggcaaacgcaactttgcctataggcggacgaattaattcattcactaaaagagattaagttgtacactaaaaggtattatatttagaacccatattttatttgccattaatatcaagtaattcctgatatatcagagaatcgtttttcattttattgcacatccacttccatgcaggcatcaccttgatttcccttctcttgagcttgcatcaaccatataccaagtaacttgtatgaggtatgagttgtataatgtcagaaattcttgcgctgaaacgcccccttcccatcaaagccagatgcttttatacgccatactataaattttcaaatagaagggtagccttcaccttttcttcgaaaccttttattcataagtgataacgggtgaagcatatcgcccttcaccgatccttcacccaattttcatatgtaatcataaagacatcgttcactttgctataagctaatttgtttttgctataatgatattcgtattagctataacctaataaaaagatgctaatagattatttttttcttcccaatgtttgtttcaaaccattgatagtttatttcaaacacttacaatgttttctccactcactaggtgaatagccgtcccttcacccgagatcactgattaataaaaggttgagaggaaaaagtgaaggtgaaggcgacactcgtaacatctgctgtatggttatttaaagcaatgctttagcaaccataaagcatagcttttgaagatacaaagcattgctttacgaaggagataaatgtgctaagtgatattaatggcaacaacaccttgaaataacatctcttaaacacaaaaaatcattctaaataccagacttcttttatttattcccattctcccactttattccgaaaaaacatatatctttgctgtacactttctgcgcatcagcgagatgtaataagcgggtagtggtttttacaacttaattggagtaaataacgtattatctctcggtcttgaaacttagcaatttcatttagaagagggatgatacaacagatactccacgtggatggctgtatatcaacatatcagttatagatgtgttatatataaacgattgacgtggatgtctgttgttatcattatctttctaagggttttgctaagacctcaagaccggataatggttcaacagcatccatgtcttttttgtatccggtcggttcccctacataatccccataccccataaccctccgactagaaagcaaaatgcagggatgcttgttgcaccatgcttggcaagagttattcgctcttttttgttaaacgcataaacaaagaaacactatgccgaaatggattagcatagacgaagcggcgcacaagtacggagtcaaagaagaagacatctgtttgtgggcagaaatggaagcaatcaccgcatatttcactgaaactactcttatcatagacgaaaagagccttcagaaatttatgtacctgcgcaagaatcttcccacaacaggatatatccgcacactagaacaactctgtatcaatcagtctgaagtgtgtaaactgtacatggaagtcattgagctacaagaaaaagaccttcaatacaaaaagcgtagaatttcagtgctggaaaggcagtatgcgatggcaaccgaacagaacaagttaagagaaaagataatcacgataacctctgatatgctaagtaaagctgaaagtggatggtgggaaaaattgtggatgaagatcagcaatagacaaaagttataaaaccattatacaactaatctatgtcttatttaaatatgagttcaataacactaagctatcagagcatattcctatataacccaaaaccttcatcccccactttaatctcctatcgataggaagaagtggaagatgaaggtctaattatatctataacaaacaagttttattctattgcagtccggtccaagcagatattgcgtacttagattctacagcattctctaagttgtccggcaaattatggaagaagtccaatcctgttaattcttccagttcgtcaattgttttagcacattcagataatgcaggctttactgtagtactttgatctagccaaaaaccaatggctttataagtttccccctttttacaaagtaatgccataaaataatatttaggaacaggtttcgatttatctccaccaatatatgtccatatttggttttctttatctatagtcccacctttcacaacatacagagtatcacgaaaagtactacttcgcccccaagtacgaactttcccttccaaatcattccaaatacccttagttccattaaaataattcttctgaggactcatattgctataatagaaagtttgctcattggcatcttttgaataaagacgatctgaagaagcacaaatatgcccacgatcatagccttgctttccaaagtcactttgtactcgttgatcagactgaagaatattcggatcagcctgccaagggtctcctccccattcagtctgttcccagtaattacggttccaatttgtttgtcctgttacattataatatttaaaagccacccaacgagcgtgctttttactcttgtcatactccatactataggtagtcacatcctgtccattaaacttagtggaataggaaataaaaaggtcattaaccccttgcctcaagacaggaagttctatcggaccagtcgctagattatcaatattatttgtaccatcatcatctttactacaagctgtaaaaaaaagtgtaatgcacaaaagatttaaagaaagtaaattccgaaagaatgtattcattttcgttttttatcaaactatttaagacaaaagcagggagttacgcacataactccctggcaacatagtattctagaaattatttaacttcactaatttccatatcatcataataaacagctccaccgtctgttgttcccttatacgttcttacttcaaagcggaattttactgctcctgcaggagcagtcagcgtaacgctaaattgtttccattctggactatcttcagaataaggagcgccatctcttaattcatctttatgatccgcaagagtcttattagccgcatctacccaaaatgaccacatacggtttctagcattcacatcgttgtccaaataccaataagatattttatacttcttaccagcttcaatcgcaacttcttgttgcaattttacagtagatgatcccgaagtatgttttactgaattgtttccactatgcttaatgcttgtttcttttgttacagaagtattataggttttattatcccatgcagtaggcagttctgcagtccaatcttcaaaacctggattaatcaagagattatctcccgacggttcaggatcagtaccaccattttctactccaatcaatctgatattatacagtagtaatcccatcgtattatctgctccaactgcagagaattttaataccgaagttgctgttccttgtacagtcacttctgcctgcatttcaaaaaacacgttggcatcaccattgtcttttgatacaaccttacttgcgacagtaccttccacatcattcaatgcaacttttaaaacattcagatcaatggatgacccggtattagatacattggctcccaattcatatttcacaatgaatttgctatattttgaggcatcaatacctgagatagtaaatgaatgagtattatttgacgggaaccaaatgctattcacttttgccgtttctgtccgattagcctctgtcatatgtgcttttgcacgaatattacatttcgcatcagctacttcaaaagtcagattcttattatcccatccagtaaatgcagcaacatttgtattcgcactgacaacttcaccaaaagtttcagtaaaaacagtattctcttctggatctggatcaggatctacaccaccagcttcttttccaacatatagattatcaatttgataggtaccagttgctgttccaccaccaatatatttaaatcctatgaaaccaattttacctgctaaagcagtcaaatcagcacttaatgttacaggatccgaatatccatcagctttctgcggtaatgttccaacattcaactttgtctgtgtcagtgtttctccattcttttccaagaaatacacttccaagcctgtaccttccacatagtaagcagaaacacaatcaaatgttaacttcttaacagccatttgatcaacattcaatgcaggagtcacaaaccaagaaataacagattcctgattagcgccataagctgtagcctgtatcaacatattgctattagtatcagctttgcctctccaagtacgaccaccagcttctgcaaagtttacatatcctgctggtttataatcagtatccgctacagcatcagcaaaagtattagttacttctgctacaggattagaaggatccaataatgaagccaagtcaccggaaggagtatcaccaccatcaccaatatccttgccatcgaaaacggcagcagtagtatttttaagaccagcaaccccaaagtacttagttaattgccccttaattacaacagccttgcctagatttccttcgttatctttcaaattcaaagcagtacgaacatctgatcctcctactagctgtactggaatacatttcttgtaatctgtctcatccgcatcagcagcaatcaaaatatttgcggcatttgtaaaaggaggtgcaaatacagcatcagtcgaaatactcttatcattaatgcaacctacaatatatcccatcacccaagcttctgagttatcctgtttcgtcatagcacttgctatgtcatatggattctctttcgtaccatctccagtcaaggcaggtccttcgccgtttcctcctccattgatatcataaggagcaggaacatcactacaactaaatgtgactaacgttattatagtcaagaataaagcatttagaatctttttcataatagttgaatatttattttattagttatttctttgaatatcactatatgttctagctacaatttgccatgtactattataacggctcagaatacctatcacattaattttacctgtcggcatcacttcggttgagaaattagcataagtgctggtacggaacgtcaatgttgaattatcatccaacaccaatgtacggtttactccattaccaccatccttcaaatcttcaggagcaaaagtagcagtaccatccgcttctttaattgtaacatccttgaacatcacaagtacaggcgccaagtctttatcataagctttcagctgagcgccggtaagttccattggaataagctcgtcataccacaattgaggtttattgattactctgacatgatccaaccatacagccaagtccatacgtccaatggctcctttgtaggtagtacctatctgagcttgcattccgtatccacctacattcaagttttcacagtcaatcaccactttctgtccaacagggcaatgagcatagatgccagtagagttaatacctaccacaatagctcctgtttcatcagccacaatcagctgtttgtagatatttccactttcgtcgtcacctactactacaccggaaatccgagtttcttcagtaactgtctgaaactgatttgccgaaattactgaactgtatttttccttcagattagcaatcgaaatagtccgttgctcttttatagtgttattaccataagcgttccctgtcacaggcgtatcaaagtcgtccatacatgacgaaacgcctaatgtcagcaacaacgcggcagataaaataaatgttatctttttcatatcatttccttgtattaatttgcccatttatttagaatctatatccaatgttcaagaaagcattgcaagcaggagcataatagtacttagagttcttagagaaaacatatgtacgtgcttctccgtcatcatagctatcatcacggttctgctcatatccgccagtacgcaagttcgtattattaagaatattgttcacactgaggttaatgctcaggctctttccattcttcaaacgaatatatttaccaatagaagcgtcaagcatgaaaccaccattcaattcttcctgctccggtacattgtagcctaccggattaccattagcatctacagcgccatcagaatactttcctaatacactacctaaacgacggtaagtagagaagtccagataaacacggtgataataatttcctgttacgttaaagaaccaacctttcacgctgtagtccagtccgaggctatatacagacaacggtgttccgttatcacgaagtcctttacaataaacgcggtcaatattagattcactttcactttcataagtacgaacagccgtaggattattcatataacgggcatcagaccacgtaccgatagctgtcaatgacagattggacatgagtttaaaagttgcagcagcttccacaccccaattttccttatcaattccgctcatagaaaggtaagtgaaacgagcttcattatcattgtagaaagcatccatttcaacctgatcattaaaacgagtataatatccagtgacacgtcctgaaacaataggagtattgaaacgataagtcaattcaccgttataaatcttctctgttctcaaaccatgtgcaaaatcgttcttgatacgaggagcgatgaatgagttatatgccaacggagcacggttctcataaccggcgttcaagatcaatgaatgattaccgttaatagaatatgtaaatccagctttcactgcaccttccaggaatttagctgtgccactgcttcccaaagatttcttaggagcacgaccattacgcatctttccatcacggctgatttgcgctgatccaatcttacctgatacgaaataattgaaatgtccatcgttatcaccctgataacgcgcccatacattttgtttatttacaaagatattatagtcataaccgaacttatcaccttcaccgatacgtctgttaggattgtccaagtcattctgaatcacataagagttataaccataatcacggacagagaacttatcaacatctgtatataaatcaccacccaacaaatccttcatcttcttatagtgcatacctttagtagtattcacagctaaaccgaccacatagctattatgctggtcaatcgtatgattgaagatcgaactgaaattgaaagctaactggtcattatgacgttcttcctgataatacaaggtctcttttcccaatgcattggcctgctgattggcaaagtacatctgatcccaatcaatttgacgagtagacttactggttttccagcgctctgttacttcattgaacagattcaactcatcttcactcggcactgtcgacttatcatatacattaaagatagaactaggcaacttcttataataatccggacgaggatcggcagcattgcccgaccatccaagtgcacttgtaccataattactatatttgaatcctgcacttgtcttcagcttcatttctttattgatatcaaaatcccaagatgcgatagcagaaggctcgaaagagcgtacaacacgtgagttacgcttttcaccattctgataaccccagtttggattgtaatagtgactattagccagataataagcttcttctgtagaggcaccttgctgtcctctttctgtaggagccccccatgtagctatagacaagctatgtttgtcattaaagactttctctgctgccagaaaataagagaacgcattatagaatgtaccttcaataacaccttcgttagcccaacgatatccgagagaacctgtaaatgcccagccattcttcaataaacctgtagaataggtatacatacctctcagaatatagttacgattacagccggagagacttaattttgatcctgctgcatattgactggcacgcatattgatattagtagctccaccgatagggccaaaggtgaaattattaatttcaaaagcaccgataccttctttattacgtgtcgcatcgttcaatcctccaatcattccatagctgaaacgaccggtttctacatcattgaacagaacaccattaatatacgtatcgctgtactgcgaattatagcccctgacgcgaaaacgcatcgggctaaacaagtagccgacattagaaaggtacacatcattgttggaagagacaaaagcagatgcactttgagctgcatcatcatcttcattcaattgcgattcagtgaatgtgaaagaagcattatcttcacgtgcattcttttcggccttctgctgagcaaaaatagctggcgaaagacaaaacaatgcaatcactattcctaatctttgtttcataatttaaattattattagtgttaatttgtagcacgaaaattcacagttatattacagcgagagtacaaaacaacaaaaaaaaagggatattacaagaaaaaacaaagaaaaaataggtgataatacttgtttttccgttttctttttagatatttgtcaaaccaatgtaatattcagaaacctaatttatagataaataatgaaaaagtttttaacggtatggggcctgttactgtttatttcgataacaagctattcacaggagaaaaagtatgctctttacagcgtagcgttttataaccttgagaatctgttcgatacaattcatgacgcgggcaaaaacgactttgaatatttaccaaatggtaaaaataagtggaactccatgaaatatgaagcgaagctaaaaaacatgtctgaaatattaagtcagctatcgacagacaaattaccattaggaccaactattatcggtatgtcggaagttgaaaacagaagagtattggaagacctgctcaaacaacctgctttatctgacagaggatacgaaattgttcattatgaaggtccggaccgtcgcggcgtagactgcgcatttttctacaatccgaaattctttcatctcactgccagtaaactcgctccatatatttatgagaataatgatactacctataaaacccgtggtttccttattgccagcggtacacttgccggtgaaaaggtgcactttatcgtaaatcactggccttcacgtgcagccgcatcacccgctcgggaaagagcaggagaacaagtccgagccttaaaagattctttattaaatgaggattcaaatgcaaaggtcattatcatgggagatatgaatgatgatccaatggacaagagtatggctgttgcattaggagcaaaacgcaaagctcaagatacaaaggaacatgatttatataatccctggtgggacactttaaagaaaggtaacggtactttaatgtatgatggtaaatggaatctgtttgatcagatcgtatttacaggaaatttattaggtaatgatagaagtacactgaaatattacagaaacgaaatcttcagaagagattatatgttccaaaaagaaggaaagtacaaaggatatcccaaaagaacacatgccgggggggtatggcttaatgggtatagcgaccacctgccgaccatcatatatttaatcaaagagataaaagactaacgaacagttaacttatgaaatataaattcatccaaaccttactattagtactacttcctaccctgtttgcagcatgcggtagcgacaacaatgatccaacagataatattggcggattaactgttagtacagaccttaaaaacaatgaagtttccgcaaagggaggcagtttctttctacagataaaggcagaaggcaagtggaccgcctccagccaagatagttggtgtacgataaataacaaagaaggaaacgggaatgcctctactatctgttctgtatccgctaatgatgatgatgaacgttatactgttatcaccgtaacatccaatggaaagagtgaaaatgtaactatcactcaaaaaggaggaaatggagaagagcctgatccggatcctaatccatcgggatatgcaggaagaattgagattccaaagctaaaaggaggtaattccaatttattcattacccatactacacaatataatggaaaagaagtaataacctacagttttgaatatgattgtactcaaaaaagctcacgttgggtagcttttactttcaatacttcaacgcctgataataatgtaggtcgtgcaggagacttcagtgatgaccctagtattccatcacaatatcgaacacacgacggtgattatacaggttcggggtatagcagagggcaccttgcagcttcgtcagataggcaatattctgtagctgccaataaacaaaccttttatatgtctaacatgaatccacaaatacaaaacggattcaatggtggcatatgggcaagcctggaaggtaaagtacagtcatggggaaaaatcaccaatgatcaagacaccctttatgtagcaaaaggggggactattgacaataataatattatcaaataccttaaaacaaataacactattccagttcccaaatatttctatatggccattttatcactaaaaaatggtcaatataaagcaataggcttttggtttgaacataaatcatacagtaacaataattatgcatcttatgccctttcaattgacgaacttgaagaaaagacaggaatcgacttcttccacaatcttcccgataagattgaaaatgaagtagaacgaagttacaataagagtgattggggattataaccatacaggagagtaatcatgagattgtccgaaaggacactgtttcctatcatcttgctctgtcatcctaaacttgtcgaagaatcttttcttgcatttatcaaagaaaagattctttacttcctttttttctcatactgaaatgcacatagccgattatcaggtgtcatactgagagttccaacatttctattatgataggttactatcagtttatttactgatttcattacgccccttctttctgtttttattcttattaatcatttccaactcctccattgtactaaacagcggttcagataaaagttccttgatagctttagagtaacccagtgcttttgctaatgctacataggatgccaatgaaatagtatgcttttgttcaaacttggcaatagtaggcgtcggaactccgctaagttcggtaagagcttctcgggaaagtcctttctcaagtctgcgtttctgcagattctgagccagaattgccagcaactcttcgggtctctctacatcaaaattataaagtaaagacatacaattgtattcaattaattaaaaaatagcactattcagatactattatatctaaatacaaagatagcttctttattcaaaaaaacaaaatataagccagttccattgaatgtattcggcaacaaaaagtatgctccccccttttctacaaatagaagaacagaagcaacacaagatttaccccgatcaccgtcccgaatcctcccaaaatccagggacgtaacttactacctttccctgcaaaaaacaaagcataaaacatattcaccagaatattactgataatagcctgcatactgcaagccacaacaaccagtacagctacgctccctgtattctgcaaaaggttcaagataaaaggagtaatgtcactaagtccggatacaaaagaaagcagattcaatccgcctgtacccgcataaaccaaagtatagtgtgtcagcactgtaaacacaacgaagagagtggcaaaaatcagagcaactttaaattcgagcgggttactgctgtcctcatcttccgactcatcggccatatccttggagcgtcgatgacgggaatggataaaccacgcaacaacggcagctaccacagacataatcaaaagataaggatagatagatgtaaatatctccctgctaaagatcagaatcaatatcataaaacgcagaaacatcatgctgaccgcaagcagcatagcagctacatattcgttcgcctcctgctcggaagcctttctgcttttacgggccaataccgaaattgtggcagtactactatacaatccaccgataatgccggaaaccaatactcccgattcatgaaacacataacgtttcagcaagtaagacaaatacgagataccggagacgacaaccgtcgccagccaaatagaataaggagtgagattaatatccggaatcaggttcttatgcggtaacataggcaatatgataccactgatagccaagaactttgccagcgtaatcatctcatcgttcttcatccgctgggcaaactccgtaaaagtgtgtttaagctccgtcaataaaagcaccgtcacaatcaccatcacataaaaccaggaaggctgggtagaaacaataggagccagacaataagtaatcagtgcaataataatggtcgttacaccaaaaacatggaattgagactgcttgacgtaatagttcaagcccagcaataaaccgagcacagcaccaccacccataaacagacgcatatccgtaggatcgagtatatagagcaaatagcctagaataccaatgaaagtaaatgtacggtcagtcccgaagagagttgtttccccttcacgcttcagactgatccgtcgttgtgacagtccgataagtaaagaaaataaagtaaccagaacgaaagttatcagttctctcggtagataattgtacaactgttccatatactgctcttttagtactaggaacaaatatacagcttatttgttaacattcaccacgttttatacggttttttcatcaggtgagagttatagtagcgtacatccccggtcacttcttcgccaataaacccgggcttgacaaacgcctcatcttctgtgcccagctctacttcagctacaataagtccttcattctcaccgtagaactcgtcaacctcgaagatatgattgccactacgtaccagataacgggtcttatcaatcattcccggttcgcaaagtttcatcagttcttccgcttcggacaagggaagttccttttcccactcatagcgactggtacccgattcgttggaagcacctttgatagtgagataacctttatcgtcacgaatacgaacccgcaccgtccgaccacgggcgctgcaaatatatccctgcataatccggctctgcgcaaatgcaaaggatttaaaatcaccggaaactaaaaatttacgttctatttcttgtgccatagcacaaagataattaaaaatcaaaatctcgtcataaactcaataacgattttatcacgctccgactctttgggaactccggacttctgatagaaatacttctcaaagttgagacgaagatcagcaataaaggctttggaaaggctcagcgtgatgccgcctgtcacacgatgacgggcatagtcgtttatcttcaaaacacctgtctcactgtccgccagcccattactgtggtcagtcatcatatcataacgggccagaaaagaaatcttattgaatacttttttcaacggcaaatcataattcacaaagctattgaccgcatgaacgtccttaaacgcttcgtgtccatacattttatataaatactccgcttcgatatgaaaacgattattctgatagtagatgccggcatcatacatattaatacgggtatgttccggctttatcatttgagtgctcaaagtgagattccaatttttattaggcagcaactgtgcttttatcgaataattcaaggtcttatgccattccttctgattagtcaggccggagccgttaaacaatccaccttcaaggacaaaaggaagaccttctttttgtgtataacaaccggtgaagccaacatcacgcacattgcccacctgcttggctataaaagaacgattggcaaaatactgctgatggggagaacgatgggcgtcaatcgtgaaaggtacacgcatctgaccaatcgtaaaattcaggtccttgacaggaaatacacgggcatacgcatcaagcatcttgatggacccctcgtcggacaaatcgatctccgctttataggcaacaatcggatgtacatttcccgaaacactgaagcgggcattccgcacttcaaaacggctttcgttggtttctgtctgaaactcatattttccccggatcgttccatgaatttcaggcaaataatctttcagttccatggtctgcttatccagttgtttgccatccccggcatcttctttagcctgtccgcaggctgctgtcgccatcaaaagcagggcgacggttgttgtaattctactcattcagttgtttgctacttaattcgcggcaaaggtacaatgagcaggatacggagagattacaaaagagatacggtgaaattacagaatggttacaatactgttacacggataacaaaggggttacaaaaaaagaattcaccacggactaccctcgtcagcatggatattcaccgtcgacaatcaacgtgtccccgtccatgcaaaactgtgtaacctgtggtgaatcaatcagccgaaaaaggaatatgcgatcagcataatcagtgccaaaataatgagtgaaacaaatactatcttgactacccgctgggcctgctcctcctctttcttactatgtgctacttttctcttacttttacccataatgttagctttaaagttcaacgctaacaaagtaaaaacaaatcttttaactttccaaaaataacactcgctaatttttgtttttatgattcctgcgatgaaaattccatcagataggctttgatgaattcctcgattttaccatccatcactccgtttacatccgaagtctgatagttggtacgatggtctttcacgcggcggtcatcgaatacatagctgcgaatctgcgatccccattcgattttcttcttaccggcttccactttcgcttgttctgccatgcggtgctgcaattctttatcgtataagatagagcgcaactggcgcattgcattctcacggttcttcggctggtcacgagtttcggtattctcgataaggatttcctcttcttctcccgtataagggtctttgtactgatagcgcagacgaacgccggattctaccttattaacgttctgaccaccggcaccaccgcttcggaatgtatcccatgaaatgcaggcaggcagaatattcacttcgatactgtcgtccaccaacggagtgacgaacacggaagcaaacgatgtcatgcgcttgccttgcgcattgtacggagaaacacgcaccagacggtgaacaccgttctctcctttcagataaccataagcgaaatctccctcaatattgatggtacaggttttgattcctgcctcatccccttcctgaaggttggcgatagtagccttgtaaccgttcgtttcagcatagcgcagatacatacgcatcagcatagatgcccagtcctgactttccgtaccacccgcaccggagttgattttcaacacacaggccatctggtcggcttcatcacgcagcatattcttgagttcgagtgcttctaccgcttcactggctttcgcataagccgcgtccacatctccctcagtcactaattcttctttataaaaatcgaacgacagttccagttcgtccgccagtgtcttgacttcattatagccgtcaatccacttttgcaggtctttcaccagtttcatctgggcttccgctttcttctggtcatcccagaatcccggcgcctgcgttcttagttgctcttcttcgacttgaattttcttcccgtcgatgtcaaagatacctcctcagcgcatcagtgcgctctttcacgtctttaagttgttcaatagtaatcatgtgatttacaattttatcatttacaatttacaaatttctcttttcggtgcaaaggtaagaaaaattccgctacctttgtttctgtcactaaaatgttgtcacaatatgaacaaactcctgaaactttcatgcttatcgctcttccttgcattagtgctaagcagttgtagctcacaaaagaagtatagctacgagacagtgcccaatgacccgctgaaagcccgcatctacacactggacaacggattaaaagtttacctcactgtaaacaaggaaactccccgcattcagacattcatcgccgtgcgggtgggcggaaagaacgacccggcagaaacgaccggactggcacactactttgaacacctgatgtttaaaggtaccgacaagtatggcacacaagattatgctgccgaaaaaccactattggaccaaattgaacagcaatttgagatataccgccagacgacggacgaagcagagcgcaaagcgatctaccacaccatcgacagcctctcttacgaagcatccaaatacgccattcccaacgaatatgacaagctgatggctgctatcggttcttccggcagcaacgcctacacatggtatgaccagacggtctatcaagaagatatcccctccaaccagatagagaactgggcaaagattcaggcagaccgcttcgagaataatgtcatccgcggtttccatacggaactggaagctgtgtacgaagaaaaaaatatgtctctgaaccgggacaacagcaaagtgcaggaggcgatcttctcctctctcttccccaagcatccttatggaacacaaaccgtattgggtacacaggaaaatctgaagaacccttccatcaccaatatcaagaattactataaacaatggtacgttcccaataatatggccatctgtatgtccggagatttagacccggatgaaaccattgccctgatagataagtacttcggcagcttgaaaccgaatccggaacttcccaaactgaatctgccgaaagaagatccgatcaccgcacctgtagttaaagaggtattaggtccggatgcggaaagcgttgcactggcatggagattccccggattggccagcaaggatttcgaggttctgcaagttgtttcgcaagtattatacaatggaaaggcaggactcatcgaccttgatctgaaccagcagcagaaggtgctgaacagctacggttacccgatgggactggcagattactcagccttcatattgggcggacttcccaaacagggacaaacgctggaagaagtcaaggacctcttgctgaacgaaataaagaaacttcgtgccggagagttcgatgagaagatgctgcaagccaatatcaacaatttcaagctctacgaactccaaagtatggaaagcaatgaaggacgtgccgacatattcgtcaactcattcattaacggaacaaactggaaggacgaagtaaccgccatcgaccgcatggctaaactgaccaaagaggatatcgtagcctttgccgataaatatctgaaggaggataattatgccgttgtctacaagaaacaaggcaaggacccgaacgagaagaagatgacaaaaccggagattactcccatcgtatccaaccgggatgtggcaagtccattccttacctccatacaggagaatgcagtaaagcccatcgaacctgtattcctcgacttcaagaaagatatgagccagctgacagcgaaatccgacattccggtactctataagcagaatactaccaacgatctcttccaactgatctacgtattcgatatgggtaacaacaacgacaaggcattgggaacggctttcgactaccttgaatatctgggcacttccgacatgacaccggaagaactgaagagcgagttctatcgtctggcgtgtactttctacgtttctccgggcaacgaacgcacctacgtggttctttccggtctgaatgagaatatgccggctgccatgcaactattcgaaaagttactggcagacgcacaagcaaataaggaagcttacaacaatctggtcggagatatactgaaagcccgtgcagatgccaaactgaatcaaggacagaacttctcccgcctgatgaattatgcgatgtacggtccgaagtctcccgccaccaatttactgacggaagcagaactcgccagcatgaatccacaggaactggttgaccggattcataatcagaacaactacaaacatcgtatcctgtattatggtcctagcagcagcaaagacctgctggctaccatcgaccaatatcaccaggtaccggctactctgaaagatattcctgcaggaaacgagttttcttatcttgaaacaccggcgaccaaagtactggtagctccttatgaagccaaacagatctatatggcgcaaatttccaatcttgataagaaatacgatccggctatcgaacctacccgcgaattatataacgaatatttcggcggaggcatgaactccatcgtcttccaggaaatgcgtgaaacacgcggactggcttattccgcatgggcaggtataatgccgccaagctatctgaagtatccatatacgatacgtacccagattgcaactcaaaatgacaagatgattgatgccgtcaatacgttcaacgatattatcaacaatatgccagaatccgaagcagccttcaaattggcaaaagaaggattaatcaaccgcatgcgtaccgaccgcatcatcaaaagcgatattatctggacttatatcaatgcacaggatttgggacaaagcgtagatccgcgcatcaaactctataatgacgtgcagactatgacattgaaagatatcgttgatttccaaaaggaatgggtgaaaggacgcacgtatgtgtattgcatcttgggagacaagaaagaccttgatatgaataagctgaaagcggtaggtcctatcgaagaactcactcaggaacaaatcttcggttactaaagcatagtgttctccataaaatagcagacacatagcctattgatacacaaagaacaaacggtgaacagcttgccaaatatgcagcttgttcaccgtttatcgtttatcatcaggccagaccgagaaaagccttattcttcgtacatcttctcaatcagttctttgtagttttcagaaaccactgagcgtttcaacttcaatgtattagtcaattctccacgctccatgctgaaaggttcaggaagtaatgtgaaacgtttgatctgttcataatgcgcaaattgctgttgcaaggtctctatccgtgcacgaaacagaccgacaatctttggatgctgcaacagttcggccatatctttgtattcgattcctttctccttcgcatagtccttgacaaacccgtacaccggaacgatcaaagcagaaacaaacttccgctgatctgcgataatagcaatctgatcaatataacggtctatcaccagtttggtttccaatgcttgcggagcaatatatttaccattcgatgtcttaaacaaatccttaatgcgctctgtcaggaataactgcccattcttgaaataaccggcatctcctgtatggaaccagccgtcagcatcgatagcagcagcagtagcctccgcttttttataatatcctttggttatactttttccacggagcaggatttcattgtcttcgcctatcttcacttccagtcccggcaataccacacctaccgaaccgatatcataacctaccggcaaagtacatgataccgtagccgtagactctgtcagtccatagccgaccaccatgttgattcctaccgaatgaacaaattcattgatttcatcgggcacggctgcaccggctgtcggaaagaaatttccattctcaataccgatcgtcttcttcagcaaagaataaatagtcttctcgtagaacttatatttcagttgattcatcaccggaggggtctttcccaaccgaagataatccagattatggattctgccgactttgatggcatccagcatcagcgccttcttcaatcctgtcgtttcattgatcttctcctgtacaccggcatataccttttcccagaaacggggtacgctgcacatcagtgtcgggcgaatttctttaatggttgtctggatatctgccggacgaagattgatgcagatctgtactcctttatgaatacaaagatagcaccatgccttctcgaatacgtgtgtcaacggaaggaagttcatagaaacgtccttgtcggtcattgtcgtcagacgctcgtcatgcgtatggaactgctccagatagcacgaatgatgcaacattactcccttcggctctcccgtcgtaccggaagtataaaggatgttagccaaatcatcgtaagaagcacgtgcggtacgttcttccaccacctcattatgcggcaatccttcgcccattgccataaactcatcaaaatagatggaagagacatcacgcgggtcttttactaccgaacggtcgaaaataatcagttgttgtaacgaggaacaaaagccgaagatgctgaatgcagaatcatactgatactgttcgcctacaaaaagataacggatttgcgcatcgttgataatgtattgtgcctgtgcgggtgaactcgttgcatagaacggaatagtaaccccgcgattggcaaatgcgccgaaatcgacatagaaccattcaggtttattctgtgaaaaaataccgatattctcttgttcctccactcctagcgcaacgaaagcattagcagcctgtcgtacagttccggagaattgattccaggtaatcggaatccattgtgctgtctcatagtcgcggtatctcaatgctaccctgtcgccatacttttcagcctgacggtggaccaagacagataaatgatgataagtcatactctttgtattgataaatatggtacaaaggtattagttttatttgaaactattgcgcaaaacgagtatctttgtgcaaatattaagctctaaattaacaagtttgtatatgaaatacgatattccaaccatgacagccgaagctgtaagcctgttgaaatcactaatcagcattccgtccatcagtcgggaagagacgcaagccgctgatttcctgcaaaattatatcgaagccgaagggatgcagaccggacgcaaaggaaacaatgtttggtgcctcagccctatgttcgaccttaaaaagccgacaatcctgctcaattctcatatcgacacggtaaaacccgtaaatggctggcgcaaagaccctttcacaccccgcgaggaaaacggtaaattatacggattgggcagtaacgacgccggagccagtgttgtttcgctcttacaggtgttcctgcaactatgtcgcacttctcaaaattacaatctcatctatctggcttcctgcgaagaagaagtttcgggtaaggagggaattgaaagtgtattaccggggttaccccctgtttcattcgctatcgtaggcgaacctacggagatgcaacctgccattgccgaaaaggggttgatggtactggatgtaactgctacgggaaaagccggacatgccgcacgcgatgaaggagataatgccatttataaggtattgaacgatatcgcctggttccgtgattatcgtttcgagaaagaatcacctttactcggaccggtaaaaatgagcgttacggtcatcaatgcaggcactcagcacaatgtagttcccgataaatgtacatttgttgttgatatccgaagcaacgaactttactccaacgaagatttatttgcagagatcagaaagcatatagcctgcgatgcgaaagcccgctcgttccgtctcaattcttcacgaattgatgagaaacatccgttcgtacagaaagcggtgaagatgggacgcatacctttcggttccccgactttgtcagatcaggcattgatgtcctttgcatcggtaaagatcggtccgggacgctcttcacgttcacatacagccgaagagtatattatgctgaaagagatagaagaggctatcgggatttatttagatttgttagacggactaaagctttagtccgtctttaccactcatcaagtagaaaatcggctatatgccgatgcttaaccccttcaatattatcttgccatagatcatccatactaaccacatatttaggataatgatcatcaattgccagtaaaggggcaaactcacaatcgatggttgcttgcaagccaagttgataagtaacctgcacatatattttctcttcacgcctaatggctacaaaatcaacttctttttcatcctgtttacctacatatacttcgtatccgcggcgtttcaactccatgcaaaccaaattttcgagcattccccctattaagcggtcccgatatcccatcacagaataaattaatgaaagatcacttacaaaatacttttcattggtttgcagaatctctttgcccttgatgtcataacgtggtatacgttgaatgacaaaagcactatctaaagcattgagataattataaatcgtattgatatctactttccgttgctgacttttgaaatagtcggcaatatttttcgcatttagtttattcccaatattatcaaaaacaaacttcaccactctttcaagcatttctacgttacgaatgctatgcctctgcacggtatcacgaagaatgacagaagaataaatatcatacactattttgtagatagcattataatcatagtttgccgtatgaatagccggaaatcctcccatacgaagatatttcagaaactccgttttacggtcggatacagaaattgtcagcgggagatcatgaaataatagatattctctaaaggataaagtcataatgtgaaaggcaacgtatcttcctgccaaataagtcgaaaactcggaagatagtaaacgtgaattagaacctgtcacataaatatctacatccaagtcaaccaaaaaggcattcactgccttttcccaatctgtaacttcctgaatctcatccaagagaatataatattttcccggggctttcgtagcttcccgaatatgagcgtataacgccttcgcctccttcatgtctatccactcgaaactttcaaagttcatataaataatataatcctcagatactcctcttcgtaaaagttcctcacgaattaaacgcaacacgaccgacttgccacagcgacgaataccagtgataactttcacaaatggcttatcaataaaaggagtgatttgctccatataaagttcacgattaatcatacaactgaagtttttagggttatagacacaaatataaataattaatcggaagtttttaggggtatacccctaaaaacttccgatttcaagtatgttttatggttatagacagaaacgacaatggcatttatgaaaaaaggggcacctcctgtatctttatctaagataagaaatttagccaccatcataataacggtggctaaatcaaagaaaaacaaccagtttcaatggtctattcaatccatcccggatttacaaagagcatagagaaaaaagtttacccgattcatattatatatcaaatcagacatttccatgcgatccactattgctcattttgttaagatactgtttccatatcaaaaaggcaattatgcctaacagattaaataacaaaaccaaaatgacccataaatatttatatggtttagtaagttgatgacttttcaacacgaccaatatcccaatcaacaaaatcagaacataaacaatttcaaaaaacattggaggcataatcataatttttattctcaataatcattaatatgcagaaactgtaacacttccctttcccgcactcttatcgtatgtccctgaagaattaataacataagaaaggttaaagccaacaacctgagttatagttgccttaattttccccgtactattaaatgatatagcatttcctgatacatagccactcgcataagattgagaatacgtataaactgataatcctgttatatctgtcattactgttacatttttgttatcttcgatcaaagttacactaaaccatgtaagattccaaatccaatcactgaatgaataaatttcactacgtgttttagcaagcggcacactaggtttctgctctttagtagaataaaacatacagccattttcttctttatccttatacatctttaattcaacagggtgttctctaagttgttttatatcacgaaacaattcttcaatttcttctaatgacatctcattttcagttttttctgaaggattaatctcaaagaaatcgacgtttacatcatatttttcagctaatgatgcaatctttgttttaacttcttccttcttaacttctgaattagcatcaaactcttcatttgtacatgcaattattactaccatagtaacaactaaataaaataaacctttcatattcataatgtttttatttaaaataataaatcaactatatcatattgctccgaatataccttctaaaagacattaagattctaattattccttttccaacaacctgataaaataggcacctactacagtacgccccgtaaatcctactatagttttcccatccgtatttatcaaatcagccattggtgtgcgatctgtagtctcattcataaacttatgaagcggcaacataagcttacggaattgcatacggtcagcactcaacgaagcagtccatactgtccaatccactttcgtataactatgtctgctatccaacggacatccaaactcattcatcttagtaagatagaaatccgtctctttctgaataactctctccgggaaaagattcaagccaagcagcctgtcccacaccagattatacttcatcccccaactatccggttggtcaaaagccagtcggtaatggtcacccgcataagcagccatttcccattctttagccatctcaccggcagcattcatatacttctccgcttcttctttcttattcagcatttctgccagacgtgcatacgctgcaatacccaaaacacctttggcggataaattagcatgatgagggcagttccctgcaaaattatctgtagtaagctgatcaccggtatccgtgccgttttccaataaatactcagcccattgagtcaatgtcttccaatgcttttctgcatacgaagcattcttttccattttagcaatagcagcagtcattatcaatccgtttcctgcttcttctacaggcatatcaccacctatcgtctgcccgtttacgataggatatcctcctaaatcatgcggaggaaatggctttccccatttcccgctttcactataataaaagaacggattaagcatcgcttttaccaaatcgggattgtagcgaagatatagtggtgaagccggataatattcatccaccggacctacctgcggagtaaaataaagcaattctccatccgaatcttcagacatctggaaagcggatacagactgacgataagccaaagcacagagttcagcatattcttttcctccggcaaggtaagcatccgccatcaattgacggtcaaaagcataacattttgccatcacttctttataatctttctctgcatctgcatacaaatcttctatgcttgattttccgtctttattccaataaggtcttaagtcctcgccgaaataagccattgtatacagtccgtcaaaggctgcagtgagatgttgcgggaaatcgctgttcatatccagcttctgtgcaaatgcagcatagcgtttctcggcagactttctcatttgtttcagatctccctctttcataaagtatgccctcatttcggctgcatccccctgtgcacaggtcacgtcatcctttgttcccagatagaaatatccccatgaccgtccatctttctctttatccacccataatttctgattttcctgtccggtcttcatcagagccagtccatccttttcatatatttgtgtagattgtccggcacgaaatgccttgtgcgggtctatttcaaaataaacagcaacatcatgttctttgccatccaatgctttagcctgataagagatataattgaccggacgggcaagtgtctccagatcgtccaacagataaggagcggtaaagctaagtttcagttctacatctccacattcgaaggtataatgtgtttgggttgcttgcacatcgacagacgtttgttcagcttccctcaattctgcatatagtccgaagtcaaccaatgcacctcccatacgattctcacaatgagcggcaatcacggctttcccatctttcatagtttctgcaatagaatccgggatatttactctgagatcacttttccactcatatcccgtgctgaccagttgcattccattcacatacaattgaaatacatcatcatgggaatagcgtaaatacagttgcttgtttttcaccaacgccgggtcgaatgtcagttcgcgcctcacccatatattaggtgagaaccagggagtatgcacatttcgttgatcatccgtgccgaaggccgcctgtccttctgtccatgttgtatcgtcaaactctttggcttcccaattttcctgaggttgctccatagtatatcttcccgtccactctttttcataagagatgggggctaccttttccaccggcatagtcggttcctcggcaaagagtccgaagtctaccaatcctcctcccacacgattctcacaatgagcggcaatcaacgcttttccacttttcattgtttgcagaattgagtccgggacttccactttaaagtttgctccccagtcatatccggtattcaccaattgcttcccattgatgtacaattgaaatacatcgtcatgagaatagcgcaaataaatctttttatgctccagaagatacggatcaacttcaacctctcttcgtacccaaatattagaagaagtccattgtgttcttgcttcccacatgccaggcgtgccaaatgccccttctgacaattgccagtacttgtcatcaaaatccggttgctcccatccttcatcaggaactaatgaagtgaactttccttcccacttttcatggtcaagcgccatcggagcgatagcttgcatcggcagttctttactacccataaaacggtacatagcaccgtctacccgtaagaagccaacaaaaggaagttgtgtgctgccgccaaaagtcatattctgtttgttcagttcatccgtcatagaccaaagtttcacatgcggatgcaaagttaataacggataagcaggcgcacgaaggtcacttttagtagtttcatcagagtaaggagtacttttgcaagctgccaatactgctattagcagataaatgaatgttttattcattagtgttttataaattctcattcggttactatatttatttctattatcacacaataaacaatccgtagattcctaaatgcacaagcgaagtgattgacaacaaccgtattaattccatattcattctagttttatagacatattcattttttgtatttctctttccatttctcttttcatcatcctaatagtagttgtcttaattttcatcggtttgctaataacggcctcagccatagcaagcgatcgttctttttcaccattcgttttgtataaatggaatagtttataaagaggtagaaagcgcgaagggcacatcatagatgcactattataatatttttccgccagttcaggtttgttaagctgctggtaattttccccaattattaactctaaatcataatctgcccaatattgacgacattttaaagccacttctagactttcggtatattgcttcatttcttgaagaacagcagcataattatagagaaaatagggattactcacaaacatcttttctaatctctcataggttggaagagtttcattatatgacttacataacgctagcgtagaagcttttccccagtctaattctgcttgaatacgttcgaacaatttactactcccgaaaagagaatatgtaagtatgaacatacaagctattttctttattaggatattagaaaataaaggtttgatatattcactagttattatgaatatgcttaaaaatgtcacaacccaaacgaaaggatatgcaaatggataagaaaagaacgagaatattcctattgaagacaaagaataaaaggctatttgcttttctacacttggattcttcctatagcaatatataattattaccatcaataacaacaatactaataaaccaataatcccaaaatttaaaagaagtccaagatattcattaaatggttgtttcacattatctgccaacatagaaaaacggctttgtccgcattgcttaaagaaatttgcctgataatccatatagtgcgcttcgaaactacccaacccatgacctatccaaggagcatcttttaccatatttataccacattgccaaatcagcagtctaccatcggctgagtttttcttcatccaatagcaaccaaacaacaataatatcagactgctacataataatagatacttccaaattcttttctgtttaagcttttgaaacaaaaatatcgcaattactattgcaacactaataattccagctcttgaatatgatagtacaattgctattacaacaataatccctaaaaaacatactagataccgtatttgcttattttcatttaataattggaatacaacaaaaaagggtaaactgacacaaagacaagcagaaaatcccgtaggattttcaaaactccccattatcttataaaaagtattaaaggtggttatattaaaacattgagacagaccatatattgcttgtaaactagaaacaataacaatactcatcccagccaatcgtgtatcaaattttacagattttcctaataacattctaattgaacaatatattgttataattaaaacaaataagatcgtatataaccatttagaaacaatatagggatcggttatctgggtagaatacataaaaacactaccaatgcaaagaagagcaaagccgatttgagtaatactcacttttgacatataaaaactcattattacttaggaataaataaaaagttgattataaaccacaaaacattaagtatttattcctaagttttcatctacttattttaacacataacatgtcttctaagcacatccaagacatttaatagaaccacaagaaaggctaaaatgctaggaagatattctttcaagccttttttctttttaggaactttacttactgtataaagaaaaagaaagacccacattaacacataaacacctgaaatataccagtcatttatcaaataattatagtttctattaattgtcatgagcaatacagatagtatagctaaaactataaagatattataatacctcatttagcgatctatagcatttgacaaacaatcataataactacgatcagcaagagttgttgcatagtcatagccagcagaagcaccaatagcacaaagacatacaccaagcccccccgttgcacaagaacaaaggagcatagatgatagataaatagcagaagcataagcgtagtcttcatcatatctacgcttacattccgctttagtaacacctcctgcactttcacccggactttttagcaatagatgttgcatagtattctgcgaattatcagagaatctaataaaaacattcattttttcggactcatctaacaacttaaaacttttattagctaatagttcctgtcgtgcattctctaccattaaagcctctttttcaatgtcaaccttactcacaagttctatcatataatcatcattatttaagttattcataagttcatcaaattcttctggagtcaaagttgaagtatatgattttaacttctcagcaagtaacatacagttcattccgtaatctaataattcatcagattcggctatagaattgacaattgttgcacgattatccattgattctaggttagctctcatttctaatgatgagttgggattagcaacaaaatcgtcattctccgaactacaactttgtgcaactaacgccacaaatagaatcaatactgatacgcttaaaaaaaggcttttctttctcgaaatcataattttaaaatttaatcattaataattatttacttattaaacttgttcatctttactaaatcatatatcgctagcttaataaatgacaattagcaaaataaatcaagtttttattaaaatcatatctgaatttacttccaaatttgttcagctgctgtatacacaaatattcgttcctgtattcctcgtgtattgttacataataaaagtaaagcattcactggaattttgatataaatcagcgagtccgctttagacctttggtctccaagagatttccaattattcctccttgcacaatagaataactcataatcatcacccgaacgaatatagttatcataactccgaggcgtataaacaattcttcctatctgcttaggagttccaagatcaagacctgaccaaccaccggaaggttcgatataatcaaaagaagttgtgacatccccatcaaatacatttgtatactcatgcgaaccatctttttgaaaacatccgggagtacctataactttaccttttaaagaagcggtatcattaggagtataaaaagccgcctccgcaatattacagtgtgaatctttgggacctatatatctgacatagcgatacgattttgaagaatacgattgaacaacagtctgtagtcttttcggtttctcgtttatcaagtacaagacttctttttcacgaaaatcaggatcattgcttccttcaaatgttccgcctatcatacgattcaaaaacatctcatctgcccgcaaagtatattttgcaaacaaagtaacatcctgtacactatccgaaggagtgaaaaaatgaaactcattggaaacatttatttcaaaaggatcggtccaaaaacgaagtcgtcctcgctcgtaagtggcaacccgcatgacgggtcctttttgtatatccgtaaagacaatgtttttaccatcgaactctgtccatgcaacaggctcccaatccatccgtttgctggcacatagataagcaattcttgaacgtggcttacctttatatagagcgtcctttggtatgtggagttctttcttgaaatctttggtataagggaaagtaatatctacgatatgcggatctttgaaaagaggaacaatagcagtatccaatttcagcatttcttcctgcatagcacgattcagactaaaggtattgcgatagacctttatcttgggcattccacacattgcgtcttttcgtacttcactcacaccgttaggaaattcatgataataaagtatgccatacttatctgaaaatgctacccattgatggctatcattctcatcaccgcgaatcggcatgaaatcaattgaacacggaatacccaacgcacgacaaacataaacgacaaagtctgaaagttcccggcaactacctgctttcagttgcgcaacttccggtcccacatgaggaaggctggcaggaacggcagtagtaaataccactcctcctttacgaattgaatcgagcaaacaacgggctgccacaatcgggtcttctttatcaagtactccggatgcacgtaaagaatcgagcaaaggattatacttctgataaatagattcacgccagctagtcaaggtctcgtcaccaatacgataaggaagaagatattcacaaaaatctgcaaacgaaacatgtttcccccatggttgttcctgccacaccttaaatgaccattcaatattattacataaataagcagaatcaacagtttcaatatctctataggattgcaaagaatctaaatacaatgccccatacatgtgacaaacagagtcagccactacttggggagaaatccccaatccacgtgtttcctgtagtaaagtatagtaagtaagatatcggtccaactgcttgcccttataataggtgtaataaggcatgttctctatcaaaaaacaagcggccttatatttcaaactatccgccggatcagttttataatgagataagaccttttccagttccacacggttctctcctgcctgctgaagagcggtttcaaggaatgaaaccattggagtgcatttttctttttcagcacatgaaaagaaaaagagactaccaattgctacgagcaaaaagacagataccaactttgtgaatattttcataattatcagaaaaatagagataaatgatttcgtgttatttttctgcaaatttacaagttcttttgccatagaaaaagagggcgttacactcctacagcatgtagaatgtgccacaggaggattacagcgaggatatttttttattttccctaatattgtaacaaccgaaataccccaaactttccttctctgaccacatattatccttttttgaatgaatattatcctttaaagtgataccaacattcagccctttcagatttgacatcctaatagtatagatcaaacgctgtacatctttagttcaatcgtagtacatcgtctactccaacgttgtacatcttttactcaactgatgtacaagaatcagacaacttaagtacttctcattatcaagtcttgtacttatcagtaagtagttaagcttaattttttatttcggataataacgactggactaaaccttaacaacgaatgtgttacaccaataagctatcatatagcgcctgtgagctttctaggagcgattctccttcatattttacactaaattgtaacatcacaaacatgaccaaattgacactagaccaaatattttccttttattgaatgattattatccctaaaataagtctatttttcgttactttgcatacacatttaataaaacagaatatgatcacaaaaaagaaaaaatacactttgtattatgtaatggcattagcctgcggactggtagcttccttttttatttatagttgtagcgcagacggatattactctgacgaaatagaaaaaaacgaggtaactaatacacgtgcactttcatcaaaaatgataaataatggaagcactcttattgattccatcgccagttcagatgaattttgggaattcgaaatgagctccgagcttttagctgataagtttcatgagtacacttctattttaagtgaagaagaatatgacaaacttatggaaaatctgaatgatgatgactacgtggaagacttcatgaggaaagccaatctagaaaatgaactacagcaactggcaaaagctaaagaaaacctgattaaacatacaagatttttaagattaagcgcagatgaacggacacaactctttatactatatgcagaaagtaacgaacttacaaaagtaaaactcctgaaaacacgcgaagaaggaggaagtactagtagctgtgaagaacaaaaacaagcggcatataagcaggcaaaagctgattatgacaatgctatcgctaactgtcaaaatggttcaatgccatctggctgcttaatacaagcagctgcaaaatatgatagagccaaagatatagcaaacaaggaatacaaagaatgtatagctaataaatgaaaatagttaaatatataatcttatataatataatgtgggggattagcatcactatgtgttactttcaccgctttattgatgatataaattattctcttcaagacttccttattactttctttgaacttctagcatggattgtgctcataatcggagccatcgacacattccctcaaaacaaatattcgaataaacgcgtatggttctactacgctattatgggaggatttatatcagcaatccattcttttataggactaataaacatactagagattacctaatgtaactcctgcaaaaaggtttccatgtcctcatcttctatacctaagctcgcacggacacgagacctcatggcacggcaagcaccatcgctaatatcaaaaatagacaaaatctctttcttagttttcctcatcctaataagtacacaatatacaatatgacgtggaggaatttttatttgcttatcttttaaccaaacaaaaaagtcaggatcaatcgcacggcatccttctattaatgtaaggttctcactggcagttaattgatatatagattgattttctaaaagtctgcgcacaaatatgacgccttccaacacaggtggaggagaagacagcagttcctgaagccgtttctcttgaagaattgttttttgccgttcaatttccaatgaacgatagaatgagatagacaacttaactatccctgctattgccaaactgacaatgaccagcacaggtaaagtataagcagatattacaggagccaattcaacgtgaacctccttaggcataacaacataaatctgatttgcaacaatcaacaaaaaggcagcaatgcattgccaatcagttatctcggagggtaatccagatgttcctttctcacgaagtgtccataggagtgcgcccacaaagagaatcaaccacgcaaaaagataaaaagatgacgagaatgcatcaacatacattcctgggaaaaacatctgaaacagataagcagccaacaatacaaggcaacagagcaaaccacctgccaacctactctttataaagtcagcgaattgtattgttactcttttattcatcgtatcttattttaaacactgcaaagataaaacattcccattatacaaatccattaacaggctattttatttgagcatgaatatgaataaaacaatgatttacctatgtcggaaacaaccaatatagaagagcaagaaaaataatgtataccaatattcttatctctttgtatattttattatgacggagaggataatctaatatcactaaaacaatgaaccaaatagctatcattttcgttggaagctgtttattcaaaggatcaccaaaaagtaaaaagaagcctgccaacaccaatataatattgattatcaaaacaactgcatatctcatattattatacatttaaggaaatacaaaatagaatacacagagaagcactgtggctataatgttccttatcaccccataaattttattatgacgaaaaaggaagtcaagcagcaacgttacaagataccaagctattacaacttgcgtcaaatcatattgccgttccaaagggtccatgaatactatatatatatcaatggacatcaacacaatggttataatccaaaccattgtgttttttatagttatattcattttcaatgatagataaatctgtccaatcaataatagactttcttgttttctctggaaagtaccaaataatcgtccacttttacatcaaaataagacttagctttaccgtcatcattggaaggcaactcctctttatcagtcagcgcctctattatatcgatttccttcacgttctttttcaatttggggaacaacaggctgacatatatgtatttacgattgcaacctttaataatcatcaacttatccataggtgcgccaccatcgtatcctctcaccatgtattcatcaccggttttcttatctactattttaaatcccgggctatagtacatccattgccagtcgaaatagatgggttgcaggaacgttactttagtatcatctttccttctttcaatagaatgcaataaaggctttgtacccatgccatgctcataggttctatcggcaacgatctctatgctatctttaggagctgtataagccgcatcaaataacttttgatcgcgtgtcttggcctgttcggcagcgtcatcccttaccaactctcttgatttctgaagcttcggcatcatttcctgcaccatttccattgacagctgttgtatcatcggcattgattcagttgcaacggcagttgcagtctccccaagttttcttcccgcaggagattcataaaaagcaaccacttttttcagttcatccaatgtcatgtgttgctggtaaataggagcatatacttccatgactttatcttcaatcttccgtgtccattttgaagcaaaatctttccaataagcctcatcttgttggaaaaacccatttttcatactcgccatcaattgagacattatagcttcagaggatgccgaactgccggaaagcgtcatgatcttttttagtaaagttttgtactcgtcggtctggtctgaattctgagccgaagccggtaaaatagaagtaagcgatgtggctacgcagatcaccattaagaaaaggatttttttcatcatataatagttttgttgatgaagtcaagttaacttcattgtgttatacattcttacaaatatactctaattattattagaatacaaacaaataacggacataattataaactgcggcaattattgtctgatttaccggaatttctttattgcattccccaagtaataaatagggtgtctgtattgaaatcagacttttttagattaaaacaataggacgattgttacaattcaatggataataccttttttttgcaatgataatagtttgaatatcaatcataagccacaaaaacaagtgtaacattcccttttttcacacttaaaagattcgtacctttgcaaaaagagtatgaagtcctaaaaaagaacatgacatccatttaattttaaataaatatcacttatgaatcgattaagacatttaatgtcattatgtatttttatatcactaatggcatgcgaacaaaatgaagactgggttgtaaatgaaccgatgcaatcatttgaagaaaatccagagtacgctcctctcaatactattcctgattgggttagtgaaaaagtgacacctaaagaatacgaactatggagaaccatgagttcaaggtatgaaataaattattcctttttaaaaaaggatatttcagaaaaaaggaaaaaagaaatctatgattgcatcaacaacatctgtgaaagaatagaaaaagggcagattaataaatatgaaggattcctaaatatagcagatgaagatggcaccaccctatcagactcacaatattttggcagaatagcaacaagatcaccagaaggaggagctgaatataagacaaatggatgtacattgtatacacatagcttaggtccctatataaaagctgctgttacttacaaaaaatccgatgatgatgttacaattacgtcatcgagtgtttatacgggatcaccatatttaggaaatgacccgagtttttctggtgcttccagtgtttcttacgataaggataagaaattaatagccgcatcgtgtagcggaactttatcattcaaagatggatccagaaaggttgaggtaactgtacaaaagacaggattcatgatcccatgatcaatttgaatatacacaagattaatcttggtacagttagtactcttttgtgattttctattcagatcttgaaaaaagttatagaacaattaaaaataatagtcaccatgaacaacattctaagtaccaatcatacgtccatctataaattattattcgtcctattttttgcagggatttgtaatctgccatttaaatgcaatgctcaggaatactccaaattggacgaagtaccacagtgggtcaaagaaaaagttaatcatgaggaatataaattatgggaagtcatgagttctgtttttcaaattgactactcttttctcaaaaaagatatctctcaagaaagaaaaaaagaaatacttcacctcttgcaaaacactgtgtcaagaatccaaaatggttcatacaatatcgaaaaaggctctttattttgtgtagctgatgaatttaaaattgactccttgacaaattggagcaccgaaatcttagaatgcaggaaaaaaagcggtattatttattccagcagggacggctatgatgcgcattataaactaactgtgatttatggatatgacaaaatgaataaaaaagtatatccgataaaaaatgaattagagtgtattagttactccggaatagagattacatgcaacgacctgccaattgtaaaatataacgaagtcgaaggaaagctgcaaggaacctgctacggaaatcttttcttcaaagacgaaaaaggtgcgactcacagtgaagatttcaccaaatatttcgtcttagagccttgaaacagcaactaatataaataaatgaaaagcattccagtttcttctattctatattttctgttgagtttgggagtcttattcgtaaatgcaaacacatttacagattcccaaattttccctaaatggatttttatgttcgcaggattaggagtaattggatgtcttttttcattttatcttttcctgggaaaaaggtttgtttgcaatgcaaaatgttgttactacacggttattatatcttgttttcttcaagccggatacggtatattacaatttttcaatatactgtcttcacattccatcacctacaatgttgtcggtagctttgataatcctgccggttttgcaggaagtttatgcgcagggttaccatttaccttctattttttacaatattcaaacaaaaaggttcaatgggccagttggtgtgcattgtttgttattgtcttaggagtattgctatcagaatctcgcgccgggtcaattagtatatttaccgtattagtaatttactttattcaccaaaacaagaataagttccactataaaaaacatatcggtagcttcttactctgtctatcctttctgctgattagcatatttgtcatttctgtaacagtctatcatctaaaaaaagattcggcagatggtagattattaatatggcgttgcacatgggaaatgataaaacatgagccttttacaggatatggagtcggaggattcagcgcacactatatggattatcaagcccaatatttcaaggaacatccggatagtcaatttgcaattttagcagacaatattaagagtccttttaatgaatacctttctgtcggagtccagtttggtattctaacttgggtacttttgatagctgctggtattttcttgattctttgtcacaggaagcacccaaccaaagcaggatatgtgtctctgctctctttactttccattgcagttttttcttttttctcttatccattcacttatcccttcatttggattattagtgcattaagtgttagtactttaataggaaaagcctatgaaaataccttgtttcaaaaaacaacaattataaaaagaggaattgcttttttcttattaataggaagtttatttttgcttattgaagtggtgagcagaattaaagcagaactggaatggggaaaagtagcgcatatgtcgctctgtggacgaaccaatgacatgttaccacgataccataatttactacatacttttagaagaaatccttatttcttatataattactctgccgaactttgtgttgccgaaaaatataaagaatgcttagcaataacggctatttgctgtaattattggtcagattacaatttagaattagtacaagcagaggcatatattggcctaaaacaatatgatgcagccaaacatcatttagagaaagctaccttaatgtgtcctgtaaggtttatacctctttataggttacattatgtctacatgaaacagggaaaggcagaaaaggcaaataggctggctcaattaatcatagaaaaacctgtaaaaaagaattctacaatcattcaaaaaattaaggctgagatgaaacatcatttatcgagaaaaacatgtttgtactaaaagcatacacaacagtgcatttggaaggcgaaaacataaataagaatacgccttttatggtcgaagagattgccaaaactttaaaggcaaacaaataacggacataattataaactgcggcaattattgtctgatttaccgtttctcttcgtccaagcaaccctataatcgcttgattttcacttattgttatcagtttttcgtagggccatcttcatcgttccacccgggtagaacgaactgtctacgtctgtgacacgatcggtttacctgggtgcaatgatcagttcactcgggtggaacgatgaagatgtcggtaagataatataagaatgtaagggagatatgctaaggacataagtgtcacaacatacaaatgataggcagagtaaaatcaatacagctgtagtctgtagcagaaagaatgatgagagacaacttaaaaaaggatgagagatacactgtttgggagcatattatgggataaaacgatgagagacaccctgctccgaaggtatctctcattcattattcatctagttatctgatctttacagaaaggcagtgagaccgtgagactaattttttttttatttcttgggagcgagcagattattccttatctacagaaaatttaaagatacactgactcatgtatttttctcccgggcgaagcacagccgaaggccattccggtttgttcggagtatccggatacttctgagtttcaagacatacggaagcacgctgattatatgtgatacctttctttcctgtcagagaaccatccagaaagttgccggcatatacctgaacacccggttcgttggtatatacatccagtacgatacccgttttgggagattcgagtgaagcacatttacgggaaatatcccctttggcattcaatacccagttatggtcataaccatttccattcttcaattgtacaaaatcgtagtcgttgatgcgtgcacctaccggagtcggagtgcggaaatccatcggagtaccttctaccggaacaatctcgccggttgtcatgaatgtgctgtctaccggagtataataatcggcatccaccatcagcagatgatctgcattatttgccgcatcgccgtcaaggttaaaataagagtgattggtcatatttacgatggtcggcttatccgtttctgcttcatagcgaatatcgatagcgttatcgtccgtcagtttcatcagaaccttgcaggtaatgttacccgggaaaccttcttcgccatccgcagcgacataagtcagttccacttcttgcggattcggttgcacagcgtcaaacacacgatactggaatccattgggaccgccatgcaggcaatgaccgtaattattctgaggcaactgatattcaatgctgtccaatgtgaatcgaccttgattgatacggtttgcgtaacgaccgatgctggcaccaaaatcagaaggtttgctgatataatcctgaatagaatcgaaacctaaaactacatcctgcatcttaccgtctttatcggggaccatcacagaaacaatgcgtccaccgaaattcgtcacacaaacttccatgttgttcttgttacgaagggtgtacagatcggttttcttaccacctacttcagtctggaagttagttcttaacaggccggagtcggttggttgctcggctttcggggtacaagcagctacaaaaagggcagaaacagcccataatgctaaattcttcatggttgatataagtattattataaattagttcaacgaacatcttttatttagattgcaaaattggcgaaattctgatagtttggaggcaacattctttccaaataatagcacaaatcagtcatttcgccaatgatgcaatcataaacacttatatctttctaaatcaaaatgatttatcttataacaaattcaagtaaactgattccatcaccagttactcctttgtattcgggaaagccgatattctcaaccgggccgctcccatcggaatcaatgtaatctcttctttagcgcctttcaccgcatcttcttcgggcaatacaccgcaaagtccagtttcgtcaatctgccattcggggataatccggccggtagctttcacttccaaaggcacattggccaccgtgaacgggaagttatcagcaggccaggacttacgaacgactttgaagttcttcaaaggctctttcttatccaataccaacgaatagttccagggactgttagcatagatttcagtagtaggccacttcttcgggtcagcacctttctgccatttggagtcaccgatagccgtttcacgactgtctttttctatatatttctcgtcaatcttcagagataaagtcaacggaccataatccacacttacactgttcttattgacttgccacgtacgcatggacaaagacatcggaagagtcatttctactttatcaccatccgcccattcgcgttcgatacaaaggtatttaccggatacaggtttcacactgatcttctttccgttgacacgcacttcggctccttcagtccatgaaggaatgcggaggtagaacggaaaatcgaccttttcatcggtagaaacggtgaatttgatgccttcttcaaaaggatagttagtctcttcgtgaaggacgatttcttttccattacccacttttaccgtagctttacaagcagcatagatggcggcagcaataccgttgtcgggagttgccaatatcagatgttccgaaaaataaggccagccttgtgcatggttatgctgacagcaacggctgctgaatggattcatggaaaggaacggaccacggttgtcaatacccggatgatggttctttgagtcactgacagtatgattcggacaagtgatgtagcgcaaagccttgaagtccggcatcacagcggcaggataagagttgaaagctacttcttcgcaatgctcagcccacatcgggtcacctgtcatacagagcatgatctcatcggaagccatctgttccaccagtccgcaggtttccactccctgacgaggatcgatatatcccagacgggcattctcgtcggcaccgaacataccgcccggaacctggccaaaagtgcgacggatcaaatgatgtacattataagaggctttgagcatggcggaatctccggtctgcatataataagtggcaggttcgcggaaacactgggcgatgttcacattgtgccagttgggcagggaggttgattttgtccagtcggctgtgttgcggtgaatcttcttggcaaggtccagcaggaaggcatctccggtatggttataaagccaatagatactgatgatgttgtcaccgccacggctgttttcccaatagtcttccagaagtttatcgtcggggacagtcatctgccatttgaagtagttcgtcatcaggtcaataacccgttggtcctgagaatactcataataagattgcagacaccagagcataatcatctgtgcccacaactcacgcttgccgttccgttcgttgacaggaccgaagtatccatcgggctggcaactggcaaatacaccttcaatccatgtttttgtttctgcaatcattttcgggtcattcaggatataggcaaggttgccataacctttcagccagtaaggtacttcttcccagccatgatcaccaccggttgtcagccaggcgttattatctttctccagccaggcactgatttctcccagatgtccggtcagcccgtcacgttgcagttcgaggtacttctttacccagccttccggctggatgctgccgacaggcagcttaataaagttcaacggacggagcggggcccgatagctcacataattcacattcgtcgattctgtgtcggggcggtccatcacccttacagactcactggcagtgcgtgtagtaaaagctgctgtcagtaacccgacagtcagcagcgtacccgcaacacctattttaaaagatcgtttctgtttcattttgaatatttttttggagatactaccgactttttagtcagccttgttttaattcggtttatttataattataaatcaattctccgccttttatcagttcattgtgagatatacggtagtcagcaatctttttcccgttgaaatggatacttttgatcggtgcgtctttctttttccgtccttctgtctgaatagtaagtacgtttccattcgtcaaccgcaacagtaccctgtcgaaaagcggagaggtcagatcatagtattcatctcccacaagcagaggatagaaacccattgccccgaacacgtaccaggcactcatcgtaccgtcgtcttcgtccatttcgggactatacccttcgggggcattcttgaatgctttacccagataaggagtcttaaattccgagttgcctccatatttatggatcatcggttcggtcatcagactgcgcactatctgctgggttttctccggtgccccaagtcggttgaacaggtaaggaacatggatatccggttcgtttccctgattataaaggtgatggtcgaagaaataggtaagttgcaaacgaagagagtcctgccctacccattctatcattttatcaatgtattgtggagccgcccatcggtattgccaacgggttccctgatagagtccgttgttcttcatcacttcaaaagcgggagtcacattcataaattcctttttccatgtttcttcaaaaagagagaccgaacgttgccggtattgttcggaatccgccttttcaccgatgatttccgcaatctttgccattgcccacaagtcatatgccgattccatcttctggtcgggcgaacgcatgggcagccgctccatttcctgcttcataccagcgtatcctttacggaaatcaaggttggtaattcctttccggtaagcgtccagcaagagaattacggcatgttccgtacgtactgtcggggtagactcgaatccggtggaccagtctttctttcccgttgcatacagatgaatcagggaagtcgccatatcccgcatcttcgcaggttcggtcagtaccaacaaaggaaatttagtgcggaaggtatcccataacgaccagttactgtaatatcggaagtcttctgagatatacacttttccatccgtacccagataagctccgtccggagaactgacatccgccggactcaggtaagtacgatacagggaagtatagaaaatgaccctgtcatctttcttgcctcctttgacgtcgatagccgacagttgtttttcccactgatcagcggtccgggatttcacatcttcgaagtccatcttttcccaacgggcacattcccagctcgccagttcggaacttaacgcagacagtccgatacggacttccaccgaacgtacctttttgccaaaggtaaggcaggcagtcgtctctttctgttcttccaactggaaaggatggctggtatttaaggagaaatagagtttgtagcgtccatgtccgcagacgttctttgcctgtacatagccttcgatgcaagtttccgatatacgtttgtaatggcaggtagctacgtcttcaaacgtagaggcgaagtctatccaaagggcagcggaaaggcttcggggaaatttatagcgttccaccgccatagcgttggtcgctgtcaattcagttttgataccattggtaaaagctgtcgagtaatatccgggagttgctttctcgcgggactttttaatatgcaattcctgtgaaggagctaccggacgaatgcgcaggtttcctcctccgccactacatcccactccggagaggcggttgacagagataccggagactttcgtcactgcataatcataaccggcatggctacgcggatcattatccggacacacacaaaccattccgaaaggagcggcagcgcccggagctacctgtccgttatcaccggaagtaccgataaacaagttgacatactttgtattttgtgcaactgacggtgtcatgatagataacacgactaaaagaagggcataccatctgcttcggttgtttttcatgcttctaaaatagtatcatcctgtcactcttcgctacgctctgaatgacaggataggataaactaatgatataatatacttatctttaattcttgtttacagagaacttaaagatacactgactcatatatttctcgcccggacgaagtactgccgaaggccattccggtttgttcggagtatcgggatacttctgagtttcgagacatacggaagcacgctggttgtaagtgatacctttctttccggtcaacgaaccatccaggaagtttcctgcatatacctgaatacccggttcgttagtatatacatcgagtacgataccagtcagcggtgattcgagagtagcacacttacgggtaatgtcgcccttagtattcaatacccagttatgatcgtaaccgttaccattcttcaactgtacgaaatcgtagtcattgatacgtgcgcctaccggagtcggagtgcggaagtccatcggagttccttcaaccggagcgatctcgcctgtagtcatgaaggtactgtctaccggagtataatagtcagcatcaattgtcagcagatgcgcctcattacgggctgcgtctccgtcaagattgaagtaagagtggttagtcatattcacaatggtcggcttgtcggtttccgcttcgtaacggatatcgatcgcattatcgtctgtcagcttcatcaacactttacaagtgatatttcccgggaaaccttcttcgccatcttctgccgtgtaagtcaattccagttcttgcggattcggctgaacggcatcaaacacacggtactggaatccttgcggaccgccatgcaggcagtgaccgtaattattctgaggcaactgatactcagtaccgtccaaagtaaatcgaccttggttgatacggttagcataacggccgatgcttgctccgaagtccgaaggcttgctgacataatcctgaatcgaatcgaagccgagcactacatcacgcatctgtccgtccttgtcgggtaccatcactgaaacgatacgaccaccgaagttcgttacacaaacttccatgttgttcttgttgcgcaaggtatacaaatctgttttctttccatccacttccatctggaagttactttgcaataaaccggaatccgttgttttctcggctttcggtgtacaagctgccattaagagggcggcaactgcccatacacataactttttcatggtattctattaattgatactattcaataaatctactttgccttcgttaaccaacttaagaatcagttctccgaaaagcgtattctgccaggcaaaccaggcacgggtgaagttcttcggatcgtctttgtggaaagattcatgcataaagcctgttccggcatcggtatccatcagcattttgatacaggttttgatttccgcatcatccttgctggtgaaggctttcatcatgatactcatcggccacaccatatcataaccgatatgcggtccgccgataccttcgcctgccttgcctttgaagaagtaaggattgtcttcgctccacacgaatttacgggtattctgatagataggatcgtttacatctacatcacccagataaggcatggcaagcaggctcggtacattggcatcatccatcaggaagtgatttccgaagccgtctacctcaaaagcatagattttaccatatttcgggtggttgtataccgcatatttcttcaatgctgtctctacttcctttgccaggtctttgcattccttagccaaagcagtcttcttatttaccttatcaagtatttcggctgctttgcgcaatgaagatacggcaaagaaattggaaggtaccagatattgaagagtcgtcgcatcatccgaaggacggaagcaggagacgatcagaccaaccggtttcactggtgctccgagtccgtcattattcaatgtatccaatgcacgttctgtcttacgctggaatttatacgggccaactccgtctttgcgctgttgttccttgaatgttttcagcacattggtgatagcctgaatccattcttctgagaagatgctggcatctccggttgttttccagtagtgataagccagacgcagcgggtagcaaagtgaatcgatttcccatttacgctcgtgcagttccggcttcatatcggtcaggtcactcatccagtgattgtcttcaacggcaccgtcattaaatgcgtttgcatacggatcgatattgatacatttgaactggcggaggataacacctgccagcatctctttcagttcgggatcggagtttgccaactgcacatacggccatacctgcgcacccgagtcacgaagccacattgcgtgaatgtcgcccgtataaacgaatgtatccggtttgccatccgcgcctttgcggaagtgtacggtagtatcgatggtattggggaaacagtttgcgaacatccatgccagtttctcgtttttcagaagtttctgcacacggatgatttccttttctaccgcattcgaacggaaaagacgtttggaaacttccggacgattgtctttctgaatagcgtccgtcacacatacatgcattccggacatcgtatttgcagcctgcatctgaccgccacaaaggagcatgcctgccagcatacccgcactgatatattttacttgcttcttcataaattactttttctttttaaattcgttggagaaagaataagggaaatcggtttctttggtaccacgctgctcattgggtttggaatccatcttgaaagtgatggaagcaccgttcataaggtcctcgtgagtcacgtagttctttgtatggtctttgccgttcaaggtcatggaagagatataacgtttgtcgtctccgttatttggagcggagatggttactgtctttccattttcaagatgcagcttcatctgtttgaagtaaggagtaccgagaatatactcatccgtacccggacataccggatagaagcccatggcagagaacacataccacgcagaagtctggccgttgtcctcatcaccacaataaccgtcgggagcaggagtataaagcttatccatcacttcacgaatccagtgctgcgctttccacggctgaccggagtagttgtacatatacagcatatgctggataggctggttaccgtgtgcatagttacccatattcataatctgcatctcacggatttcgtggatgacaccgccataataactgtcgtcaaagacaggaggcaggataaatacagagtccatcatctggttgaagccgtcttttccgcccatcaggtcgatcaatccctgaggatcatggaatacggaccaggtataatgccagctgtttccttcggtgaaagcgtctccccacttcaacgggttgaacggagactggaatttgccatcctcattcttgccgcgcatcagtttatgttcgggatcatacagattcttatagttcatggctctctttgcaaagatctcaatttcctttttaggcttgttcaaggccttacccagctgatagatacaccagtcattataagcatactccagtgtgcgggctgcattttcattgatgcctacgttgtaaggaacataaccgagcttattgtagtagtcatagcccagacgtccggtagaagaaacctgcggatgtaccgcattagctccgtgctttacagcttcccaaagggtttcgatatcatatcctttcagacctttcaggtaagcatcggcaactactgaagccgaattgttgccaaccatacagcctctgtgtcccgggcttgcccattccggcaggaagccgctttctttgtaggtatttaccaatccttcctgcatcttcatgttcatagacggatacatcaggttcaggaaagggaaaagacaacggaacgtatcccaaaaaccggtatcggtaaacatatagccgggaagtacttcaccattataaggactgtagtgaacgatatctcctttcgcgtctatttcgtagaagcttctggggaaaagtaccgaacgatacaggcaggagtagaaagtacgcaaatggtcgatatcatcatcttccacttcgatgcgtcccaaaacgtcgttccataccttacggccttttgccgcaatctggtctatgttatctttgcccaactctttcaagttcagttccgcctgttcggggctgatgaaagaagaagctacacgtacatttacctgttcgcctttacgggttttaaagccgatcaatgcgccggcatgcttatcgttggcttccagtttattggtatcgatgttaccattggcaacagctgccgtataagtaaaaggcttgtcaaactccagtacgaagtaattcttgaagtttgcaggaacaccgccgctgttcttggtcgtataaccgataatcttgttttccgaagggatgactttcacaaacgaaccgttgtcgaaagcatctacaactacataagagtgatcgttctcagggaaagtgaagcggaatgctgccgctctttctgtcggagcaatctcggttactacatcatggtcggcaaggtatactttgtaatagtaaggagtagccgtttctgctttatgcgagaaccagctggcacgctgatcctgatcgaaaacggctttaccggtaatcggcatgatggagaactgaccgtaatcattgatccaggggctgggctggtgggtttgtttaaaacctctgattttatcggcatcataggtatatgcccagccatcccccatttttccggtctggggaacccaaaagttcattccccagggaagggcgatagcgggataagtgtttccggtagataaggcgtgcttggactgagtacctaccagcggactaacatagtccactggtccggtaatcgttttagcatccatattccacgcactaaataaagtaaaagctaatagagcgagttttttcatggtgttcttgttttatttagttagtttttcttcaagcatctttataaaatagccgccaactacggaacgcgcctggaaacctctctgaatcggattgtccgtaaatacccagtcggacatcggaacgcgggtagtcgtttcatccataaacagatataccggttcaataaacttctcgaaagtagctttgtcctgtgccatggtagctgtccacatgatccagtcagtcttggtataagtttcacggttatccagcggaaggccgtatttattttgcttcgtaagataataagcaatttctgtctcagcaactttttccgggaaaatctgtagtttcagcaatttgtcccacaccagattatacttctggctccaggttcccggtttatcgaatgtcagacggtagtggtcgccgtcatccgccatcttcacccattcggcagccatttctttcgccttcttcgtgtacttttcagcaatgtcttttttgcccagcatatctgccatgtagccgtaagaagcaatacccatgatagccttgatagaaagattggcattgtgcgcaaagtgtccggcaaagtcatccgtacaaagttggttctccggatcaagaccgtactctaccagataatccgtccaggttgtcagagtttcccaatgcttttgtgcgtagtcggcatttccttctacagcagcaatcgctgcagcaaggactaccatattgccggattcttcgattggcatatcgcctccgtaagtctgaccgttagccagcggatatgtacctacgtcgtgagcagcaaacggtttggtccattttccgctttcactataatagaagatatggttcatggtagctttcaccagttccggattgtaaagcagaagcaacggagctcccggataagtcagatcgactgttccgatggaaccattactgaaattctctttggaaaggaataccaggtcaccattcggagcttgtaccagtttatgggcagctaatgcctgacgataagccagagcgcaaagttcggcatacttgcgaccaccgactgcttctgcctctgtcatcagtttattatcgaaagctgcacaattctgcatttgagtcttgtattcctgttctgctttctggaattgcgatacgattgtttcactgcctgtacgattccagtaaggacggaggttttcaccaaagtactggatagagtaaatatcatcgtaaccgatcagcaggtgtccgttcgctttctttgtttcacccagtgagcgcactaaagcgagtttgtcataaccattggtggtaggagcttccagcttattctctgtaaaactttggcggagtttctttccgtcaccgatagcataagtgctgttctctttttcagcagccaggtagaagtgtccccagtcaatacgtacatcgtcacctttctttttcaggatgtcctgattacggcttccggtgcgcaggaacaacagatcaccgtcagtaaagctgtcggctacggattcctgatgaggcagatcgagtgcccattgaggagcagcttcaaaatagagttcaacttggtgcgcctgtccgtcgttagaaatgacttcataagaaatatagttgacaggacgtgtcatcaagtccaggttatccataaataggggtgccgtaaatgtcaaattcaagtctaccggaccgcaagtgaagttataataagtctgcataggttgaacatcggcagaagtctgctgtgcagtctgattgaagtaacggttattatccaattctaccagcaaaccaaaatccaacaagccattcgctccacggttgtgacaataagcggcaatcaggttttctccctgtttcagggacgctaccacttcttccgataacttcacctgtacgtgcttcttacaagcgtttcctgtgtctacaacctttattccgttgatatagataatcacatcatcatcatgagaatattccagatacacattcttacctgtcaggtcttcctgaatatcagcgacacggcgtacccagataaattcctcaccccactgggtcttggctacatgttcgttctccatggttccgaaggcaccttcaccttctttccaggcagcgtcattgaagccgacattctgccatccgtcggcaggttgctgaattgtatattttcctgtccagttaccttgttccgaagttttcaccagaggtctcaattccagttcctccgttcccataaagcggtaagtctgtccgtcgactttagctacaccgattaaagggaaatctttaccgctccaatgtttgaccgagccgtcgtataagttgtccgtgaaagaccatgcactggtatacgggtctatgctcaccagcggataagccggagcacgcaactcgctcttcacatgctgttccagctgggtctcacagctacaaaatacagaggctgctcccagcaacagcgtcatcagttgttgtttcataatttaattacctgttttattttatctatttaccattctattgacacattcacaccggcaggatcgttctcgaaactcaacagaagagtttttgatgattcgtcccattccggttgttcctcttttccattcacacgtattttctctggtttacgaggcaagaggactcttgatacattcgttgtatttatcgggcttttggctacaaaagagtaactttgtttactgactttctcatcatagatacgagaagctccacagagtacttttgcttttattttattggatactttattcagatcataaagatacccctgttcacccggttggatttgtttggaagtcagtaccggcaggtctttgtcgaacaggtcgatatataatccagataacgtcagtggctctttggaaacgctttcgtccatgacagcagcaatggtatatggaccacgttctacaatgaagctgttcttggtttctatctctatcccttgctttttctgataagcggatgcgatcgtttcaaaatacttctgatcgtttccggctttcaatacaaaatgtttggggtcttcacgcatcacaatcaccgttcctttaccatagcggtaagttccttcacccggattacgggacagattcatcttctcgaacaggtgttccgaaggcgctttatattcatttccttctgtattccaccattccagtaccgtttgataagggtcgatatcttctccacaataaataagtattccgccctttttcacccaatcagccagatagttgtgatattccggtttcatcggtttcatgtttgaataagacatgacaagtatgtggagtcctttgaatgtttctttgaaaggagtattttccatgtgtaccagctctaccggaataccacgcttcaacagaggcaaagtttgtccgtagaaactggaaaattgcggatcatcgtaaccgttatgattaggaaaacgttgaaacattagtgagtttgccatcagtacgccgatgccctgtgtacctgtaatctttttatcggaagtacggatatcattcagcgtattaatcattgtctgcatctgggtggagtaagaacggggaatgcgttctttctgatccgttcccgctatccggtacagtccctgatagatacggtccggccaaggcattacttcgtaggtatctaccataggatacatcaactgtgctgcaaaagtggcctgatagttgattttatagtccagccagtctttcgcacggtcttcgatcgggtctgtcaggaaatacattttccggttcagcggtgcagtcatcgacttcatacacccgtattccagaaacgcattctcgaatacacgttctttctgcacgccgttatagaaattcggttcgcgggcagtccctgtccatacctgggcaatgtagccgtctacacaatccaatgaagccaggctggcttccggacttacaatctgccaggaagtataattaatcaaagaatgcgtcggcacataacatttgatgtccagtcctttcgattttccgtattctttggcataagtgaatatcttatccagcgcattatagtacagatgatatttcagtttgttggaaaggtatgtgttttcgggagattcgtgctgagctcgccaggggaaattataatatttctgccattcggatttaaaagcttcgctatatccgccacgcatccagaactccggttcttccagatatatggatgttatcccggcgtcaatcacccgtttgatctgtgtttcctgcatatagcggataaaactttcggtaggtacgatataagggatcagatggccatgagctatttcatttccattacggtcgcgctgtccttctttcagatgcccgtctactccatcccacttccccagaaagtagtccttgtagtctccccaggcaactccggtcataaattccgtcagataacctttgtctctccatgactgaatgcgttgttcaaaagttactccgggcttatccagtgtaccatataccatcgtggcatcagcacgtacgtctgtttcgggtttccagggttcagaagtctgaaacgtggtctttgcttctttgctttttcctttttgcgcataagtagcatgattgcaggcaagaagcaagccgagagcaatcagtaaatgtttattgttcatgatattcaggtgtattttcatttttatatctggtcgttgccccgtttctcttcggattatttttctgccggaaacagaagcatcaatgccggtataccggaagccgagtagctgtctatctcagcaccggccggtaatgctttctcatattctccgccacatacattacgtgtcttatccctgtttgcccaaccggactcgatattacgtttcaggaacgggatatattgtgtttgtccgcaatcgtataccagcatagctatgtattctgcaaaaatagccgtatagataccttgctcgattcctctttcaaagggcagcaggttatgcttcgcagacatttcattgactgtatagtctgctgcaaggattgcattatccaggtagcgtttttctttagtcgctttgtaaagcaatacggaagcaccgataaaggtagcttgattatatacatgcgctttccaggcaggattaccgttgccatgacgactatcagctatccgccccgtcttcttgtccaacaggttttctactccccattcataaatctctttgcctttagccaaatactgttctcttgtctgatacttgggtgattcttcggttgattcttttctcttcttcggaacattattgtacagtgtaagtgctgctaccacggtagggaaattgatacaagccatctttccgtcccccggtctgttcggcttgggattatggatcggctgccattgccagaacatccctccgttctctttgtcatatgatcctgtatcgcctacttttttagaaccgtaccatacacggctgaagctctcttcagacagtttcagatattcatccacaccaaacagttcgtatgcacgtgccaaagagatcgtccaccacatgatatcatcatagataaaccatccggtattttcattattattatcgaaatcaaagtgacaatattgggctttatttccagcgaatatcttttcgcagagctctttgtaataggctcttttctttttatctttctgagccttcgccagtttataggcgttcattgacatatcccagtaaataggctgacaccagatagcagctgcgccatgaccacggtctaccgcctgttcataggccgaagtcgttttatagatatatttatccgggtcgagcagcgtattattaaatccttcgtatgccgcccacacgtcttcattggtgtaagaccctgtcttctggttcgttttttctgagctatcagccgcccatacactagtagttgatatcgccagcagtaaagctaccgccaaaagaattttgcttttcatgatagttgataagttttaatatttttcctgttacaaagattgcagaaatagacgaaaaagaacgataatctctattcaataaagaacaaatacagaccaaaacacccttttgctatttgcaaacgcagataatgacttaaaaaaatccccttgccctgcattatgcaaagcaaagggaagcactgatataatttaatacactattgaaaaatctgcattaatcactgtgcgatagtcgtactttccacccattgatatgttccttccggaccttttagagtagcgacatgacgtcctgtaatatcagtgattgttgttccggaaggttgtgctcccaagacttcaaaatcccaggctgcaaccagattcggatcattcggatctacgtcaacctgccccatcgcagataaacgtagatcatcgcgacttctgatacctttccatatacgcatatatttgatataaccggagaagtattcttcacgagtcgttttatctgtattcaaacggcagaaggcagtcataggcattttctcttcaatacaaccattgttaatataagttctccaagcctcacctacacgaatcacctcgccggattgcgaaccattcacaaatacacaggatttagtatgttcctgaggtggatcaaatcccggaacaccattatccgctacagcaaaagcaaagtgtgtccatttatctttgggattgtttacgatggctctcggctcccaccattccggatcttttggaccttcattctgccaatgtgccatagaacctctcagccagtgttcattgccaccattcactttacgatactgaacacgccagccgcttcggggagaattaacaaatgcagcaaggaaggtactattgtcttcccctgacttagaacagaattctttgatatttatccaaagctcaatcgtaaaattctgattattatcatcaccaaatttcacaaaatcctcgctatatccaaagtcgatgtaaccacccttattaccatccacaaataaattccagacaagattatcttccggccatgcagaattttccacttcttgcagtttcttatcagcagccgcaatggcatcatcatatatctcctgcgtcatatctgtgatggcactggttttgattctgtctgccaaactctccaaatcttccgctgcactttccagtgtagccttaccttctaccggatattgtccctgatgatttccccacaatgcttcattagctatcatttctcttaactcatctgcttttgccatcagatcactaatgaacttctgggcttccggagaaaggttatagtatttagagtttttgaactcatctattgcctgatttaccttagctattgtagcctcaaaggtcgcctcatcaaacatctcaccgccctttaccttggtaatcaactggtccagttccgctattgcattattcagtatctccttgctggcttccggaaaagttcccggcgctgttccaaaggtagagtttttcaacaaatatgacaaagaagtccgattgtcctctaatatgctaagttgcgtatcagatatatattcattatctttatcatccgaacaagctgtaaaagtccatgtgaggcaaagcgccatcagaagggaaaggagcatactctctccccatttattaattaattgtttcatgtctttcattatttctctctttattattccagaatacgttcccacttataggtacctataattttcgctgtatgacgaccagtcaagtcaataatctcgttatctgttcccgatggtttagatgtaaagtcccatccggctgccaaatccgtttcttttccggttacttctgctgttccttcataagactgctttacataatctgccccttttgccgttttccagatacggattttcttcatatatccggagaatccttcttcatacaaatcatcgctcactctcatgtaacgaccaaatgcagtcatcggttttgagtaatctgaataatgtcctgactgataaactctcgttgtaggagaaactgtttcttctttcttcaactcaccatttaagtataattttgcacgtaatgtagaattgccgtccaaaccttcatcactatatactgctacaaaatgctgccatttattcaaatcatcagaaatctggaatttcggttcccaaagatccctgtcaccattggtcgtattcaatccaccccaagtagtacggtaaacaccattatcatctttacgccagtacatcatccagccattacgccagctactgtctgacatgtatgagcacaggaacaggcaattatcccatctgccgcgctccgtaacctttacccacaactctacggtaaatgattgatgaccttgttctccaaacttaacatattcttcactacgtccgaaatcaatatatgaattgccgcctttaccatcaacaaacagttctgcaggtgttgtttcagcatcttccgtacgaatagtacccttaaacttatcaattgcagattttgcactggcaacgtaacgctgcttttcctgctccgacggaacaggattctgatatttgatcaacagaactgaacgattggcatcatcgatagcatctgtcaggatggcacgactctctgtaggatattgccctttcttttctccatattccgagttcttctgcaaatccttcatcttattaatcagttcttccagctggtcaatatagatatcttcgacctccggtgctgcagtatatgactcgtgagtctcttccgtacaagctattagctgaagagtcattatcatacaaagcagatagtaccatactttcttaatagaatattttgtattcattattcttttcatttataggttatacttatttatcggttggaaacaataacatcagagcagggatacccgaggccgaataactttcaacagcatcaccttctacctgtagcttggtatagtcgcctccgcatatatcacgcgttttgtctctgttagcccagccgtaattaatgttgcgtttcacaaaaggtatatattgcgtctgatcacaatcatataccagcattgcgatatattgtgcaaagaccgcagtataaataccttgctcagcacctgtctcaaaaggcaagaggtcgaatgttcccgaaatcgtattcatcgtataatccgcagccattactgcattatccagatactgtttttcaccagtcgctttataaagcagcaccgaagcgccaatatatgaagcctgattgtatacatgatctttccatgcaggattaccattaccatgtctgctgtccgctacctgtccggtagtaacatcaacgaggttctccactgcccaggcataaatttctttacctttagccaaatactgttccttcgtttgatagctcggatgggagtctgtcgattctgtccttccggtcggtacgttgttgtataatgtcagagctgccaccacagtcggaaagttgatacaggccatcttaccgtggtcagcttcgttaggattcggattcttgataggttgccattgccagaacataccacctcccagccctttttcagggtctgcataagaaccggtatcacctaccttctctgagccataccatacacggccaaagctttcttcagaaaggctcagatattcctcaactccgaatagctcataggcacgtgccaatgtaactgtccaccacataatgtcatcataaataaaccagccggtattctcgttattatcatcaaaatcaaaattcgcataatgagctttattgccggcaaacagatcatcacaaagctgtttaaatttttgttctttctgagtatcaccctcagcctttgcacgcttataagcattcattgccatatcccagtaagtcggctgacaccaaattgcggcagcaccattccaacggtctacagctgccttgtcagcagtgctacttttatatataaacttattctgatctaacagatgttcattaaatgcctcataagctttccatgtatctgcgtttgtatattcaggcacaatctcgtaatccggagtataaggtctagcttctttatcatcattacaagacgacaaacaaaacgcacctgagactaagcataatgcagaaaatatatattgtttcatcatatattgcgatttattaatcaattaattaaaagccttcattttgaaccagatttttatcaatatcaatttcactctgcggaatcgggaagaagtattgacgatcaaaattacgggaagtgatttctgtacgtttgtagaactcatttccatcatagttcacgttcataccatgcactggtttgttaaagaactcattcgtcagtccccaacgacgcacatcaaaatagcgacagttctcaaagcttaactcaatgcgcttctctttctggatcagtttcatgatttcactggtagtggttgctttcggcaaactggcagtaccatatcccggaatacctgcacgttcacggatcagattcatgtatttccaaatatctgcatgacttggatctacatatgctaatgcttcgatataatcaaagtaaatattcgtcaagcggagcaacacacaaaccaagttttgattacggtcacccgaatccatattcttacgtaccagatagcctgtactggtaaagtcattgttaccctgagccttaccacagtttccactataagtgaagtcaactgtataatcgccttctgtacctgagaaccatttagaattactgaaagtgatatcagcatagaaacgcggttcgcggttaacatacatattgcgtgttccagccggtgcataaagagtaccatctgccgatttatagtctgatgaagaagtgccgtcctctttatagcccgaagcctcattgataatcggagtgacaccatcagctgcatagcctgtaacaggtgacataccattggccataaaataggcatcaaccatctcttgtgtagctcccaacaagctgccacctctgtaatcatttgtattacctgacttattgggcatacgatcatactgcatagtacctgctgcattatccatacgataaaaaatcatttctttgttattacccatttctgagaataacgttctgatagcacggcgataagactcataaggattgaatccctcagcatcagggcctgctaccgattttcctgatttatctgtatacatcaattggaaacgattgccataatcagcgaagaatttttgacattcagtaactaccttctgccagtcagccttgatagtggctgcatccggttgactggggaataatctcgttccatccggatttgccatatcggcataataagtgcactctccattaaacaaccagctggcacgataagtcaatgcttcaattataaatgcctgggctatagccttgtctatacgtcccacacctgttgttttatctgacgaagcatcttccagcagaccagcattctgtgcttctttcaattcggacacaataaaatcaaaacatctgtctacagtgctacgagacaattgcaattcattactgggagtatccaaagcataatcgtcttccaaaacaggcacaggaccatatgtacgaaccaaatagaagtaataaatagcacgcagagctttagcctcagctttccattgtgctctttccgatgccgtaagcggagcctgatctacatatttggtaaatacagcagattcatgaatacccgaataccagcttttccaacgatacaataccattgtgttttcggttgcatcaatagagttattattgatcagtttggctttattgcctgatgaagtccattcggtttcatcactcgctccggtccatggtcccggtgtacgatacaagctggtttcatgtacctggcgctgattaaactcatccggcaagaaggtataaacattcgaaagatatttcaatgctccatctctggtcttaaaaatttcttccaaagataatcggtcatcgggcacttgatcaaaataatctgaacaggaagtaagtgttgtcacaaaaaagagtgataacatacccaatagtatatagttatattttttcattgttattggtttttagaatgtgaaattaacgcctacagaataagaggttgtattcggataagaagcaccgttatctgtattcaactccggatcccataatttgaatttgctaagagtaaacaagtttgttcccatcacatagactgccgcatttttcaaacgtactttattcacccagtctttcggtaagttataggagatctgcattgtttttaagcgcaggaaactaaaatcacgaacccaccatgtactcggctggaaattgttaatgttactggaagtttcagctccataggacaaacgcgggtaaaaagcattctgattcgggttatcttcagtccagcggtcatcaatattgctatacagattaccggaaccgccaccgccgttaaacggttgaatactgctaccgctcattatacgttctgcatcatgagtaccctgaaacatcatacctaatgaaaggttcttccaacccagcgtgaagccaaaaccgtataccatagtaggtacatcaccacggcagatataagttttatcataagcgtcaatctgaccatcattattaaggtctttatacttgatatcacccgcttttaccgtaccaaactgagaagcaaacggcttcggagtagtagctttatttgcctgggacaaagactcccaacgtgccatatcatcaatttcagcctgtgtaaacaaaccttctgcgatatatcctttttttcctagaatattctgtccatattgattcatccaatcatagcgttgttccggtaattcaccttcaatccatttatccttattataggtaatattaccgcgaatagcaagcgtccagtctttattaaatcttttattgtattctactgtagcatcgaaacctttattttcaacaataccaatatttccataaggagcagatgtattatatcctaagaatgacggaatagagttttcacgttttaacaagatattttcacggcgctctttgaagatatcgaagattattgaaagatcatcattaaacagtttcaagtcaatacctaagtcttgtttgcgtgcttcttcccaaatcaagtccacagccatattcaatgtttcatatcctgaatatttcgtcccgttaggtcccagtttataaccatagtctccattttctttcatctgattcaaatacatgaaacgacggtcggaaacatcactattaccgactttaccgtccgtatagcggatcttcaggaatgatactacctttgacagcggttcccagaacttttcatttgaaatcacccaaccaacaccatacgcagggaaagtaccataacgatttttaggagagaagttctccgcaccattataaccaatattgaactctgcaaaatagcggtctttccatgaataagtagcacgtccggcaatacccatcatacgataagggatggcatcttccagtgttcctttgggataaagaagtttctgttgctgattaaagaggaataatccgcttacacgatgatcgccaaatgcgcggtcgtaatttaaagaagcttccagatatgttttcttattaccactcgtttcctgcttataactcaagacattggtgcccgtatagattctttgcagaatcggctgtccgtccaagtcataaggaacattcgtatccaagaaataataagtagactctgcacgatcctgatgaacatgtatttcattatatacatcgaatgcgtacatagctgtcaatttcaatcccttagtaagcatatccaggtcttgcgtaatgcgtaaattagaataaatctgattcttggtcagattatcatatccacgacgtgtagcttgtgaataagggttgttgaagttgttattggtggaacgccccggaatatatgcctcaccgttaataaagaacattttcggatattctaccggagaaatggacatagcagcattatacaagtctttggaagatatggccggataattaccttcacccagataaccctgagcaccaatttccactttagttgtcggagtcacatcgatactcagattggtagtaaagttatagcggctatacttcatctttgaatcaaaggtattgatgctcttatctgtcactgtcataccagtctcattgaagtagctgaccgaagcgtagtatgaaactttctcactaccaccacgtacattcacgttaacacgacgattgtgtccccaatcattaaatatctcattcagccagtccacattcggatacagatactggtctttacctaagattgtattctggatttgtgaatctgtaaatttagttgccagtccatcatttcttaacgcttcattagccgccttcatataagagacaccatctgtcaaatccaccattttagtgaaacgggtaaatgattcataataatcagcactaattgtcggtttacctattttacccggctttgttttgattatgattacaccattcgcaccacgtacaccataaacagcagttgctgatgcatctttcaaagtagtcaatgattcgatatcttcaggatcaatatcgttgaatgcacgttctactccgtccaccaaaatcaagggagtagccgtattgggagtagcaataccacgaatccagatatctgctgcatcttttccaggctcacctgtacgttgtacagcaactacaccagccagacgaccggccaaggtggtagtcaaactagccgaaggagtttttatatcttccagcttcatactggattgtgcaccgatattactgattttacgttgtgtaccgtaaccgacaatcacagtttcttccagttcgtttacctgttcttccagtacaacatcatagatatttgtagatgagtttattcttacctccgaaggtttaaatccgatataagtaaacttaagaacagcattcttcttgctgacacgcaattcaaataacccatccatattggttattgaaccattggtatctccatccacagtaacattcacaccaataagtggctctcctttggtgtccgttacacgacctgtgatttttcgagcattctgttgttgcgcggcagaaacggcagctgactttcctgagataaaaacttgtctgtcagagattctataagtacaggacgtaccttcaaagagttcagtaaggatttcgtctatcttcttgtctttgctatcaatggataccttacgatccagatttattgcatcatccaaatagaaaaagacaaactggctggttttctctattgtttgaaagacttctctcaacgtcttattgttcacgttcaccgagagagttttgagctgggaataattattgttattagcgaaagaataacttactcccaaaagtaagaagcaaagaaatagcttgagtattttgctctttcttcccttaattgaatttttcatattaacaatgtccaaatttctcataatattattattttataacttaatacttacaggcatatgagccccatctggataatacagcagtattatccactctttataaaaatcgccataaattcttgagatttattttattaattactatatttttctgtgtctattttttcacgacccgataagttttatactgtccatcataggcataagatattggtgctacaaaggttaatccattaattactgtctcaaagttgtctttcaaatcaatttttccggaacattttatcttacttagcgctgagtcaaattcgacatttattccatagtaagtggacagacgtttcaatacaattcccaaatcggcactattgaaacaatagagaccatttacccatgaaatcatttgttccacatctacctgtgaaatattttccttcccttctacagaactgaacatctggttaggagctaaaatagcttttggggtttgcgtcgtctcaacctgcacacacccttgagccagcaccacactgcgaattggctcagattcataagctgtcacattgaatttagtacccagcaccctaacgttcatatctttagtacgtacataaaaaggacgttcttcatctctagctacttcaatatagatttctccgtcaacatagatttcgcgtttatccttttcaaattctgtaggataaatgactctggtacctgcattcacccatactttagagccatcagaaaatgtcagtacagaacgctttccacgtgggataaccaactgattataaaccgccagttcttttttggatatattttcttcgttagctttaattgctacagaatcataggtaattgtagtctctttttctttcagacttacgactttatcttctgccagaatcaacaatgtttcctctgtagccggtaattcggtcttagtctgaactgcaaatgtcgcaatatcaggagccaaaaccgcctgataattctttaataaaaagaaactaccaaccaaaatagctacactggctgcggcagtcaaccctatcagaaaaaagtttttatgtttaatcttatcatttttaatatttgttgtctggatatcagcccataactctcccagttcctgatccgaaagcaaatcaccttctgaagtagaaatcgtttctatatattctcttgccgcaaaataatcatctatattagaaggagtagatttctcaaaacgatcccaaaactcttgtatctcttctgttggatatttaacagaagaaataaaaaaatcattttgaaggaattcttcaaaagtatatctagaaaaatcagtatgtttcagttctgaattaatcatttttattgtctttacattaggataacagttctactttgattttatactcacttttctcaaactattttcgatatttttttgatgggcaggaaaaagctgaatattcttctctcctattctcgcttgaatagattccgtacacgccccaaagcccgctggatagagttagatacagactgataattcatgtccgtgattttactaatttcatcaatactcatatccttaatataccgataataaacaatttcacgttgcctggtggttaaggaggacatcatagcatgcaccttcatatgagtattcttctcttgttccttatttatataaatagtttccggagtagaaaaatgctcttcggactggtcttctttctcatcagcttcgtccaatgaaaaagaatcagatgttttctttaacgcattaaagagtgtatttttcagtgccaccatcaaataagctataatgttatcagtaggggttaatttggcacggttggtgtaaatcttcacaaacacatcatgaatacaatctttgaccaactccctgtccgaagtatacagtaaaccatatcggaacagctcttgtacagtctgattatatatttgagaatacgcactcgaatctccttcgagaaacctcttccataaaagagaatcagagagagtgtgtatatctgaggccatctataacaagtttatgagtttacaaggacaaaaataaaacaataaatcaaaaaaaagcccacctttatagaaaaagttaattgcaaagagaaaagccatcatttcctatagataaatagttttctctttgcaatttccccaatactttttctattctggataaagtgtctggataaaatttatttgtttaaacttcaactacattttatatgctcatttttcattgtaaagaaatgaatagccatatgaaaaaacttatctgaagtccggagcagcagtctccaaggaaggtacagcgcctttcacaaacggccagccacctttccactgcacacgatccatcatcaatacacggccctccggattagcaacactgaccgcatgatagaacatccaatcgtttcctttcttatctgtcaccagttcagaattatgccccggaccgacaaatgccttattcttctgaatcaatatctcatgatgattatctgacattgaacgccctttcttgtcaacataagggccgaacagattcttcgaacgccccacaactgtagtatatgtgctcttcaaaccttcacagcagcggccgatggaagcaaacaaataataataaccatcccgtttatgaatatacgtaccttcataagcagtaccggctatttgctctattggagcacctttcttcaaagagagaccatcatctgtcagttccgtaccatatattccgtggaagctcccccaaaaaaggtatttctttccattatcttcaatataaaaaggatcaatgcaattctgtatattgatttcattgctccggaataacttacccaaatcagtaaatggtccttccggcttatcagcagtagcaataccaataccacatgtccactcacctccccaagtggacatagaataatacattacgtatttatcaccgattttattaatatccggtgcccatattctccctttaggttcgaagtttggacgggtagcatctgtaaaagcagtacctacataataccagtttaccaagtctcttgatcgatgaataggtacatttttaatactttcagttgcgtatagatagtaatattcatcgtctccttttataatagtaggatcgggcaaactaaagtttattacaggattagcatatgttttagcgcgaacaggggttgccaaagggctagctcctactccttcaaaagtcatacggacaggctctatttttccgtctttattaaaatacatacggtctatacaagttgcacggctgttcgctgcagtttcgcccaacggacgacggtgataaatgatataccattcatctgatccgggacctttaactaccgaatgatgaccagcaccggttgctatattagtatcttgctgcagaatttttccgactctttcaaacggaccgaacggtgaatccgcaatggcataggctacactataatccggacctccccagccaccttccgaccacataaaataatattttccattatgtttcagcataaacggcccttccacataattttggggagtcacttccttatagatagtaccatcctcaaaaggtacaatactcaataaatccggtgccatcttcaccatattacaatgtccccaaccaccataatacatataatattgtccatcatcatccttaaatacaaactgatcaatcggctgagcaccatttacaatcttatcaatcaacggttttcccaacgcatctttaaaaggtcctgcaggattgtctgctacagcaactccaattccgcctaactcattattattttggatatcattggctccgaagaagaaataatatttatcattagcatggattactgccggggcccacaatgcacgtctgagccagctgatattttctttggaaagtactttcggatgcttggtccagtttaccaaatcttttgatgagaaagcatccatgaatatctgatcatcataagcggcagaataggtaggataaatccagtattcgtctccaaacacaatcccttccggatcggcataccaaccagggaaaataggattaccactcgttttcggaagcttacttttgttttgggcagatatagatacagaacagcaaattacacagaaaagaaaaagatgtctaagtttcatatattatttatttaaaagttcacttcgcaaagatgagaaaaaacaaagaaaagtttcagaaattacagttcatttaacaacaaaaactgaccattctacttccatttgcatgatttatcaatattttatgcttactttgcattgtcattatcaaatgagaagtaccatgagaagcagattgtttttattatccattatcttattaatcggtgtctcttgccagcataagaaggctacaacagagaaagaaactgtagccgcaggaaatacctatacgaacccgttacttgaacgtggagcagagccatgggctatttttcatgaaggcaaatattattatacacagggctcagaaaacagagtcatactttgggaaaccgatgatataacagacctctcacatgctactcaaaaagatgtatggatacccaccgaccccagcaactcctatcatctgtgggcacccgaaattcatcgtataaataacaaatggtatatttactttgccgcagacgacggcaatatggataatcaccagatttatgttgtcgagaatgaagccgccaaccccatggaaggaacatttgtgatgaaaggacgcatacagacagataaagacaacaactgggcaatccatgccagcacctttgaacatgatggccaacgctatatgatatggtgcggctggcaaaaacgaaggatagacagtgaaacccaatgtatctacatcgctactatggagaatccatggacactgtcttctgacaggattctcatctccaaacctgaatatgaatgggaatgccaatgggtaaatccggatggcagcaaaacagcctatccgatacatgtaaacgaagcaccccaatattttgaatcaaagaataaagacaaagcatgcatcttctattcagccagtggtagctggactccttattattgtgtcggattactgactgcagacgcaaaagctaacttactcaatccggcttcctggaagaagtctccggttccggtactacaacaagaccctgaaaacaatgtatacggtcccggcggaatatctttcactccgtctccggatgggaaagaatggtatatgctatatcatgcccgccagataccgaatgacgctcctggcgcatccgattcccgttctccccgtttacagaagatagactggaacaaagacggaatgcccgtgctgggaacccctcaaaaagaagaggaaccaatggcaaggccatccggttcccctattcataaaaaacagaactaattacagattgtactctgagggccgagataagaacgcttcattcctcccaagtcaatgacaatcttttgaataacgacgcccggatcaccacagcgtatctgcaaagtgtgcttaccgggcttctttacatacaaagtagacttattcactctgcaattcttcaatacgctatcataccagatttgagaatattcgatagctgaagtagaaggagtagaaatggaaccatcatctatacggacactatactttgtatccgagttagtatgttccggcaatttgtagtcccgctcagcatgcaagggaaatgccggcaaaacatacgtatatacatcataaatcccggcattaaatgtatagaaatcatattccaccctggggacatcacctgcacgatacatttgcaagggagctgtcggattccccaactgcaaagagcgaccctcaaaaccaagtcccggaaggatactcatccgaatatcattactctcaaacttccggtggaagtcggctgccggaatagaaatgtaaccattctcctctacatacaatccttgtacttctgtacgtgcaggagactccggattgaatactgaaaccagtacactctccttctgactgccggaagttacatcaatttgtcctttcaccttttctcctgccggcaccttatcccagtcaacagaaatatagatacggttttccgcagacgtcttaccacttttctgagagatcagtatccagtcttccgaaggcgtgatactccagcttagctctccggtcccctgattatatatatctatccaatgacttttacgtgaataagtgctgtaggcgggcaatgtatgaaaactcattcctcctttatccaaattttcgctttctgcctgaagccccagcttaggaaagccaacaggtgtgtattcctcttccatcaatgggatcatgaaataggaactcgtaccatcatagttctgttttaaagacatcatgtgcttccattttccatccagcagagagttgtatccatcggttatgatttcgagactatcatgatagcacttcacctgagccttaagccgattggcggcagcacgttgctgacggacatactgacggtaaaactgtcctttgatggtcatatgattcatcagttcggcccctttcaccggatagtataataattgatagaaagccggtttactcttttcgtccaatgaagctaacaagtcctccgtttttttcccaatacggctatactcagtcaagcgtctttccgcttcattatagttagcaaaagagaactccgtatccgtacgtttctctccgcctccccaatagttattccaatatccccagcccatgtactccggctttctggaaaaagccaaatttatatgagaacaagttatatcttccaatgtatcgtagtactcctcaccaaacatctttgccagccaacgtgccggataagtggcgacattatccgcattgaagctgtctatatcataagccatatcaaggaaaagggagatttgtgtttcagcccctttcaagtctccgcaattcgccagccagacacgatcggcagtggtatcatacgccttacgaagttcttcatacatcaatgccggaggggtagtactataccacaaatagctatgaggaacgcccaaataagatatatgatagtaaacgcctgcacgtccggaacgcttttgttcctgcggaccactcaaacgtttcatataaccgaaattatcatccgcccagataattgtaacatcatccggcaattccagtccgttcgaatagatttccagcacttccttataaggcgtaaatgcctgtgggattgtttcaacaggtttgtcgatatgccgggcaatgatatctctctgagcattcagtgcactttccagcattttaaccttttcccgcatcggcacatctccaccacccatagctgcatcatgcaggcctcttaaagccagcgtatatacattttcatacgcacagttttccttcacacgattactcaatacctcgttgatcttatctttgttcttgttataatcccatggtcccatcgtcttgctgtcccattcgctggcagtgttcagcaataacggttcgcagtgactggaccccataacaatggcaaaggtatcagctaccagtttattttccggtatcttataaaatgcggtagaaacggggtgcatggccggtgccagatgattagctttcagtcgcagcaacagctcgcatattttggcataggtacgagggccgatatttcctctttctttctcgaatgtcttggcagcccaaggtttcaatccccagtcttcgtcatttaagaaaatccccctgtacttcaccgaaggagtcttggacagagtggcgggagcatcgacataaagcgtcttatgtttcttcaccggaacatcagcccaccagtaccaaggagacactcccatcatttccgaaagagagaaaagtccgtacgcagctccccgcctgtcgcttcccgctactaccagcgctttgctgactccggggaatggacgggaaaccgtctgaatcaggaatcgttcccatgccccttccaaagaagagatatctagcttgcccttctcagctaactggcggatcagccgatttttctcaactgtacccacaataataatctctttgtcgcctttcagtttgtccgtcaaccgtaattgttgtccggtcactgattcgacatccgaaacaaaaagctccgcagtcttatgtaccaccagatagtcatcagtatcataaactactacagctttcgctttcgaagtaaccaagggaaaagcatacttactctgaatagcattctctttaatgactacctgcgactgtagggcagaagtaaccgacaatactattaataaaaaaaggattctcattgataaagtttattatagttgtttttcagtttatttactactatccgcggaaacatacgattgttctccctccaaaagtcataattatctccggtaatataagctacttattattcaattaaggataaaaaataaccattatcgcatgaaaagctgtcattcactataaaatgacgagcatttatcatttattgaacagcaaatttccttcattcttctctgattggcttttctttgcaatattccttttaaggagatttacttcttctatttaacatatataaagataattaccatgaaaaagaattttctagcagtgctattcgcattggctctttgtagcccgacattcgctcaatggaagcccgccggtgataagataaagactccgtggggtgagcagttgaatcctaaaaacgtattaccagagtacccacgccccattatggaacgccaggattggaaaaatctgaatggtagctggaattatgcaattactaaaaaaggagaaccggcaccaagcaattaccaaggagagatattagttccgtttgcagtggaatcttccctgtcaggagtaggcaaaactgttaacgaacatcaggaattatggtatcagcgtacttttgatgtaccgtcagcctggaaaggcaaacaaatactactgcatttcggagctgtggactggaaagccgacgtctgggtaaatgacgtaaaagtaggacaacatacaggaggcttcactccattctactttgatattacttccgcattgaataaaggcaataaccagctggttgtgaaagtgtgggacccctctgaccgtggcgaacagccgagaggaaagcaagtagaaagaccggaaggaatctggtatacaccagtcacaggtatctggcagactgtatggctggaaccggtagctgcccagcatatcgcccatctgaaaacgactccggatatcgacaagaagactgtcaaagtggaagtagctaccaacgtatgttctccggacaaagtggaagtgaaagtattcgacggcaaaaatctcgtagccaaaggagcagcgctcaatggcgtaccggtagaattaacaatgccggaagacgttaaattatggacacccgaatctccttcactttatgatatggaagtcactctttataaagacggcaaagctatagaccaagtgaagagttacaccgctctccgcaaattctcaactcataaagataagaatggcattacacgcctgcaactcaacaacaaagactatttccagtttggtccgctcgaccagggatggtggccggacggtttatacacagcgccaacagacgaagcattggtatatgacttgaagaagatcaaagacttcggctacaacatggtacgcaagcacgtaaaagtagaaccggcacgctggtatacttattgcgaccaactcggactgattgtatggcaagatatgccgaacggtggccgcggtcctgccgaatggcagatgcacaagtactatgatggcgcagacgccatccgctccgcagcatcagaagctaactatcgcaaagaatggaaagaaattatcgactacctgtattcttatccgagcatcggcgtatgggtacctttcaacgaagcatggggacaattcaagactcctgaaatcactaaatggacaaaagaatacgaccccagccgtctggtaaaccctgccagtggaggtaaccactacacgtgcggtgatattctcgaccttcataactatcccggaccgaacctctatctctacgatccgatacgcgctaccgtactgggcgaatatggcggtataggtatggcactgaaaggacatctgtggctggcagacaagaactggggctacgtgaagttcaacacgccggaagaagtaactaatgaatacataaaatacgcagaccatttattggaactgatcgagaaaggcttctcggctgccgtatacacacaaatcacagatgtggaagaagaagtgaacggtctggttacttacgaccggaaagttattaaagtagacgagcctaaaatcaaagccatcaaccagaaaatttgcaactcgctaaataaataaaagtttcatattaatgaataaactattctctacaatcatgtcagtttgcctcgcatgcaatgtgcaggcaactgacctgtttaaaacgagtcaggatatcgctttgcgtgcgccgtccgtacctctgatcacttccgatacttatctcgctatctggtctccctacaacgaactgaacgaagggaacaccgaacactggacagccgccacccatcctttactgggtgcgcttcgggtagacgggaaagtatatcgtttcatgggcaaggacaagctaaatctcgaaacaatccttccgatgacaaacaccgaacgttgggaagcaaagttcaccatgagccaaccggcagccaactggatacagccccagttcgatgattccggatggaccaagggcaaagccgctttcggcaccaaagacatgaaacgcatcggtacagagtggaacaccgaagacatctgggtacgccgtagtttcaacctcgatcaagacctgacaaacgacattatctacttacgttattcacacgacgatgtattcgaactctatctgaacggagaaaaactggtggcaaccgactattcatggaatgacgatgttaccatcgaactatccgcatcagctaaagccaagctccgtaaaggaacaaacattattgcagcacactgtcacaacacaaccggcggagcatacgttgatttcggcctgttccgtgaaaacaaacagctcagcaacttcaaggaagctgctatccagaagtctgttgatgtattgccgacacagacctactatacattcacctgcggtccggtagaactggatctcgtattcacagcacctctgctgatggaagatcttgatcttatctcgactcctatcaactacatctcctatcgggtacgttcactcgacaagaaacaacatgatgtgcaagtgtatatcgaaacaaccccgcaacttgccgtacacgaaccgtcacaaccaaccatctcagaaaaggtcagcaaaaacgggatggattacctcaaggcaggtaccatcgaccagccttacgtaaaacgtaaaggagacggtgtacgcatcgactggggatatgcttatctgggaagtaacagcgcacccaacaaggacttaagcataggtaactactatgacatgaagcaagccttcatcaccaacggcaaactattgcccaactcccaggatttcattacccgcagcgaaagcgacatgcccgctatggcttataccgaaaacttaggcaaggtagacaatcaagggaaaagcggatatgtgatgttaggctacgacgatatctactctatcgaatatttctacgaacgccgcatggcatactggaaacacaacggtcaagtcagtatctttgatgctttcgaacgtgcgcaggcttcttatccctcattgatgaaacgttgccgtgccttcgaccaacaactgatggctgatgcagaaaaagccggaggcaggaaatatgccgaactactcgcattgacttaccgccactccattaccgcccataaactccttaccgacaaggaaggcaacctgcttttcttatccaaagagaaccatagtaacggctgcatcaacacagtagacctaacttatccatccgctccactataccttatttacaacacggaactgatgaagggaatgctcaactctatcttctactacagcgaaagcggacgctggaacaagccttaccccgctcatgacttaggaacttatccaatagccaacgggcaactttatggtgaagatatgcctatcgaagaagccggaaacatgattctggtaactacagccatctctatgatggaaggcaatgccaactatgcttccaaatactgggaaacattatcaacatgggcaaactatctgattgagaacggtctggaccctgaaaaccaactttgtacagatgactttgccggacatctggcacacaatgccaatctttccgccaaagcgatcatggcaatcgccggatacggagaaatggcacgtatgctgggcaaagaaacaactgcgaacaaatacatcgaaaccgccaaaagactggcgatagaatgggagaagatggcatttgacggcgatcactacaaactggcatttgacaaaccgggaacgtggagtcagaaatacaatctgatatgggacaaagtgtttaacatgaacattttcccgcagaaagtatttgatacggaaattcctttctatctgaccaagcaaaataaatatggtttgctattggactcccgcgcacaatataccaaatccgactgggtactatggagtgcctgtatgtctccagacgatgctacgttccaaaagttcatcgacccgatctatacttatgcgaacgaaacaacttcccgtgtgcctatcagcgactggcatgatacgaatacaggaaagatgatgaatttcaaggcacgttccgtagtaggtggctactacatgaagctactgatggaaaaagtcaaagaacagaaataaaacgaatactcttttcctcgttgaatatagacaaacagcccttttgcctagcgtaaaagatgctgtttgtcttttttcatatcatttaatgatacgatcagttttccggagttatatcatcaatcagatattgtccgtcaacgttaaccactctgaccgggatactcacggcacgttcatactggctgcctttagccgaagtatagttaacctcataccaattatcattcagatgtttcaccgacaatgttttcatgtcattttcacctaaatcttgcgcacgaatgatcggatcggcatctgtcgcctctatcagcctatcaactttctctatcagctctttggtcagaaacttttgcttaattgaatccccaagtgcgagagcttctttaccggtggacatgaaactggcagcataagcctcataaaagtcttcaatcatgccgatggcttcttgttcaattctactactgtccgacacattcgcctgtacgtcagctggttctgccgatgtatccatattcttccggctctgattggaacaggaaagaagaagcattacggactgcaataataacaaatgtacaattctcaatttcataacattaatggttcttgttttaaactaataatcagatttccaaactaatcagcctcccccttcagaatctcttcagttttatcctgaccggtataaaaatctatatttgcaaaataacacaaatatttccagaaataaagcgtcaggaacattcgcacatcacgatctgttttaaaatcactgcaaaaatgatccgtgttcctggcaatttcccaaaatatcataaccgaagaaactcctcctgtcgcattttccgctttgacatacgctttcaaggccggatgaatggccggttccaattctctttgccaatatgtgaagccatccaaccgtttcttaaacggcaatattatatactcaacctgagctttcatatacgcatattgtagtgaatcggcaacaaggctaagagagccaccatgctcctgctgattcttggatgcttgttgataagcatcagactgacgatattctgacggagaaacaccatccggaacaaacagcgtgcaagaatcattcagaatagctccatcaacaaaataggaatgaagtaaaccacccgcaatccctatgttttcatttaccacctagcatctcatgaattacatcctctcttttattgctaagttcatctatcaactttttcgtgtgttgtcttattgctggactgaagatttggggatactccttttcgatttcatccaaagaataatttttgttatccctcaaaaagagtacgaatacataattcatcaggtctgcttcagttggtttctccttcaagcgttttttgaaaagagaggcagcttgtttgtaagcatccatagccaggctctttttagcattctcttccagcatcattcccttacctaaaatatagtaaggatcatccggagagaatttctccatttgcaacatggtttgcagtgctttctccttctgtcccaacgccattaagtatttaatcttatttgcatatgccagtttgtatgaaggctccaaagctatcgcctcatctgaaagatgaatagccttatttaaagaatcggaatcattaaagaaacccgcagttttcacagattggttattcttctcaactgctttgggagaaatctgagctatcgcaaaactcgtgttcgtgcataaaagcaaaataataagtgttctcataattctatttattatcattgattagattttgtttaatgtgatacacaaagaacgacaaaaaacaatagaaacacgaacattttctattcaaaaaatgataaaatctattcaacaataaaaataaggcagcctttctcattcagtacaaacgaattttgataaaaagaattatcaacatgaaacagcaatccgattagtatttatagagtaatgaacagtttctttcttagattgaacgttttttttccttctttattcatcgaaaccgctatctttgtagtagttcacatgatactaaaatagcacagagaaagtgctgaacataaaaatcatacaataaaatagacaactaaaaatagacagcactaatatgaaaaacaaaccgttattatttttactctcagtatgcggacttttagcaatatctgcacgtggagaaaatccacccgctaaagtgatattcgaacagtacatgaatcaagctcaaacttttgccgataactatccgcgtgaaaaagcatatctgcattttgataatacaagctattatgtgggcgacacgatatggttcaaagcatatgtcactcttgccgaaaaacaagttttcagttcaatcagccgtcctttgtatgtggaactggtagatcaggcagggcacgttactgataaacagatcattaaactatcacaaggagaaggcaacgggcagtttgtactcccccagtcaatgctatccggttattacgaagtacgtgcttacacccgctggatgcttgcattcagtgatccgcagtacttttcacgtactttccctgtctatcagctttctcatagcgaccagttggagcgtagtatcagcacctatgagttgagtccgtctatggagaaaaggccggaagaaacaagagagaagctgagtctgcgtttctttccggaaggaggacagttagtcgaagggataacttcgcaggttgctttcaaagcagaaagcaaaaatgaaggaaatattcaattatcaggcacactttataccaaagaagggcaagaaatcacgtcttttgaaactttacacgatggaatgggagcttttgagtatacgccttctgctctgccggcaatcgctaaagtaaactttcaaggaaaacagtatgaatttaccctccctaaagcactgccaagcgggtatattctgaaagtaggcaataatgcaggggctatttctgtgacggtatcatgtaatgcagcgaccccgcaggatacattagccgtttttataagccatcagggacgtccccatgcctatcagcttatccactgtcaggcaaataagcctcagcaatttacagtattgtcgcgcaagttaccggcaggagtcttacaaatcagtctgctcaatcgtgccggaaatactttatgcgaccgctttatctttgcttctccacgggctcctttacaaatctcgcccaaaggtttaaaagagatttacgctccttatgctcccatccgctgcgaactgcagttgaacaacgccataggagaaccgatacccggcaaattatcagtcagtatccgtgacgccgtccgctctgattatatggaatatgataacaatatcttcaccgaccttctacttacatcggacttgaaaggctacattcatcaacccggctactacttcacagagagttctctccggaaacagaaggaactggatatactgttaatggtacacggatggcgtaaatatgatatgacacaacagatcggtatcagcccattcaccccacttcagttgccagaaagccaactggtactttatggacaagtcaaatctacgattctcaaaaacaagctgaaggatatagctctcagcgtaatggtgaagagagatgcagagattattaccggtcagaccgttacggatgagaacggacatttcagcattccgctggaagatttcgagggatcaatggaagctgtgatccagactcgcaaagtgggaaaagaacgaaataaggacgcttctattctcatcgaccggcatttctcgcctgctacgcgtgcatacggttacagagagttgcacccggagtggagcaacattgcccactggcaacaggaagctgaaaaattcgactctttatatatagattccatccgtcgggtagacgggctttatcttttggacgaagttgaaatcaaaagtaagcggcgccgtcaaagtacgaatatggcgactaaaattaatgagcaaagtattgatgcctactatgatatacgccaggctgtcgatcagcttcgcgacaatggcaaagttgtcaccactatcccggaggtgatggaaaaattaaatccactcttttactgggaccgttccaatgataactgtacttaccgccagaaaccgatctgttatattatggataacaaaattctatcgtcaacagaagtaaacatgatgctgactgaaatagacggtttggcttctattatcatcagtaaaggcacaggaggagtagatgatgaaattatccagaataccaaaatgtctaattccaatgatgtagatgtatcgaaactggacaaatatagtattttctacctcattccattgcccagacatgatgttctgaataaacacgagactgcggctcttggtacccggcagactgttatgcagggatatacaccggcattggagtattattctcctgcttatatagataaagaattatacatggataaagcagacaaaagacgaactctttactggaatccgactgtgcagacggatgaaaatggaaaggcagtgatcgaatgttacaataatcagtattccacgccattgattattcaagctgagacactgagtaatgacgggaagctagggagcgtgacgtattctacagttgcagaaacgaaatagtatgctttaggatatttgacaataaacggcacacaatcagtcctaaaataacttttcaaaataagagaagagggtgaattcaataacttgaacttcaccctcttcttgaatcattagattagcgattaatagaaactaccattcaattgcttgatcttcgtctggaatctgagtattgatatcacgtgataatgtcaatgtaccttttacatgatagcgaatgatggtaccttccactggtatataattgaaataataatcaacattattaattattacataacggtgttccagataaggcttcgcgtcatccattgatgaagaaatacgaaatgaaggagtcacgtccttgtttaattcaaatccaatctcttctgcattatcacaggaaatagtaaccgaaccattcgtctcaccattaaaagcaaatttgattttatactttctacggtctgtataatcctcatctactattcctgcatacgtaaaaatagtctgttcatctatcacataccctcttattgacgattttgtgatagattctgctgtttctatcggtttaccatctccatcatatcccgtcaccaccttgttggttattcctgtaccagaataatcgccagagtaatcattaaatgggaagattctcaatatcgccttagcatagtctttacgtggatgagctacgtagttgtaagacgcgtcgtctacaatctgcaatgggagtacccatttttctgacatatcaatgttgcgaaaatcaaatttaagatccagtaaacctttattttctcctgcttttatctgtagagattctggatatgaagcgtatgccaatccttctgctcccatatcctcataatatagttctgtacgtgtagcgtaacgagcgtaattcaaaatattcaatgtatcagcatcatgtgctacgtgtacagtgacattacttggattatcggtagaaccactaacaagtatcggtaactgataattggacctcccttctcctccttctgcataatttccttctgcatcatggcggctataaggtacatatatattcgtcactcccttactatccagttgtgaactgaaagaaatgtagtgctcatattgttcatcttcccattccgaattgcaggaagttcccaacattgtcattgcagccaaagctgccaaagtatatattttcttcatatataagtctttatgtttagaattaatcatacattgtccatcctgggttctgtgttaaacgtgaattacgtttcaactcactatgtttgataggccataaccatagcttttccgagaaagtagacgggagattgtaaacaggaattgccgaatggaattcgtctctcttagcttcaccaacaaagacattacaaccgtatatttgcagagattcttctactggcgcatctttccaacggcgaatgtcaaagtaacgttttccttcgcccattaactctatcatacgttcacgttttaatgctttacgcatatcatcaaccccactctgcagataaaattcgtctggatagtcaggcaacccggcacgaatacgtaccggatgaatacctctttccatttgttctttatcacggctgatagtgtaggttgtcgcctcattccaagaaggtatattgtatgttccagtcaactcattcaatgcttcagcataaagcagtagaatatccgcatagcgaattgctgtttcagctttcgcaacataattgcctggatagtcgtttggatgaacaaactttttgattcctatacctgtacgcaagtagaaaccgtcattacgataaccatcggaacttccaaagtagtaccaaacttgttgatttacatcggcaggtttgctttcagtctggctcaaataataccaggtacagccattataagcaacagaagcatagaatcgtggttcgcgttctacatattgcaaagaaacattcatcccagttttggcctgatcgttatctcctttcttcggatcatatttccaacctaattccggatatttattatccttcaagtcttgcaaatcagtaaatccggttctacgttcacgagtatctacaataccttgataattagctactccttgatacatagagttcatacccggctcattactaccattattcatataatatgcatccagcattttctgtgtcataccatgacagttccagccgccatcatctttgggcatctgatgaagtaccaacatatctatatttgttgccccgcgtgtaaatatcagttctttattgtttgcaggtaatatagtaccatcaaagatagtacgatatgatctgagcgggtcaatatttgtccatccttttggccagggttgattggaaaactcgccatcagccggtggagtaacagtcggacgttcagaaggtccattatcagatgtggatttatttacaatattcaactcataaacatctaaatcgatgacatcacggcaagcggcagcagcttttgcccatttttcttcactatattcggaagaaagcaaacgacgcccttcatcatctaccaattgctgcgcatattcatcattatttccattagcaaacggactagctgcaaaaatcagtgcataagcacgaactgccaatgcagctccacgagtaggtcggcctatagcataattatcagtacgacgatcatattgtaactctttagtaacctgtaccatttcgtcactgatatattgtgccacttcttcgtatgagctacgtggagtagctatttgatcataactttgagtataatccactccttcgtccggcataataggcactggaccataacgacgtaagagcaaccagtaatagtaagcacgaacaaaacgagcctgccccttataatctagtatttcccaatcagccatctcttgacaccggtcaacattatggataaatactgatgcttggaaaattcctttataacatgccccccatgccccaacattataagtattctcatcatattctcctaacttgaacatattatatgacaattcattctttgttgcatcgattgtcttatcgcggtcaccataatacatatcgtctgaaaaacaaaacgaattctcacttggtcctttagtcgtcacctcatagttttcattttttataaatgaaaaagcataagctaaccattcttccacatgatccttactttcgaaagttttctccagtgtcagacgatccttaaaatatttctccgaattcaggtaatcagagcaagaagaaattactcccatccctaatacggttaataataatatataaatcttctttatcataatctcttagtatttttataagttaacagataaacccatagtaactgattttgttagcggataggcttcaccccgcggattgccagtttccgggtcccatgttttgaacttagaccatgtaatcaggtttgatcctgcaatatagatacgaatattattgaagtgcagtttattgactatgctttttggcaaagtataaccgatatccagattcttcaaacgaatatatcgaccatcacgcatccaataagtagaggtttgttggttgtttttattttccccataagttaaacgcggatatgttgcattggggttctcattagcatgcaatcccagtttggcagcagtctctgaatctacccaacgatcacttatcatatctttaaagatatttccccagtcactttcgctgaatgcatatacacacttaccataaatagggaaagtggatttaccggcaccttggaagtgaacatttacatcaattcctttccatgcgaaagatgcccctataccatatactaagtttggagtggtagtagcgccaatagcaactttatcattatcgtttacaacaccatcaccatttacatctttatatttgatatctccaggctgcactgtaccaaactcttgtttcgggctggtacgaatatcatcgtaatcagcaaacaatccttcagctatcaatcctttaacttgatctacacgataccctttttgatataaataagaatagacttgattctcttcatccttttcgagcacttcattcttactataagttatattcccacgaatagtcatatccacctcacccagtttctgcttaagagcaaaattgccatcgaaaccttgagatttcacttcacctacattcgctttaggtttgctctcaagacctgtaatgtcaggcaagaactcacgtgttaaaaaaatacctgtacgtttttcgtggaaatagtcaactgtcgctgtaaatttgtcattaaacaaagaaagatcaatccccaggtcatccttagtcgcaacttcccaagtaatgccattagaagccatctgtgtgtaatgagttcctatgaatgattttccataatcaccaaatccccagttatatacataattaggcttgccttcgctgttatatcctgtagtggctatagtatataagtatgggaaacggttgttatccccaatattatcattacctaccttaccatgagaataacgtattttaaacatattcatccacttcaagttattcttaacaaatgactcttcggcaacgttccatgcaagagaaaaagccgggaagaaaccgaattgatttcctggtgcaaaattttccgatccggtataaccaaaattaaaatcaacaaagtaacgatagttccagttataagtaaatcgtcctgctaacccttgattacgttttgatactccattcttaatatccgtaccaatgtctactgtccgcttctcactatcttgtgtgtaacggaaagtaactcctccatgatgatttccgaaagcacgttcccagcttaacagtaaatcaaggaattcacgacgtttgccagagctaccacttgattgtgtcatgtcatatgcggagaacattttctcataaataatctctcccgtttcttgtctacgtccgttcgctttatacaaatctggttgacgatgacgattaatccagttactgttgtctgtatcatagccaaaacgtcctacaaacttcaatcccttggtaatgaaatcaaaattttgttctaatgtaacattagtttgtacattattctgccaatcttcattgtatccagtttgcgtagatgcaacccagggattaagtttgtttacgttatcccggtgggaaataggcgcatatccattggaatagtatacaggcgttgcaataggattgtatccgaaaagcatgccccataacatctcgttatcagccagtcctggactattacgtttggctaatgaacctgctatacctagtttcaataaagtcgatttggtgatatctatatcaacattcatacgataattccactttttatagttggcatttgtatcgtaatcatcacgtaacgtttggtctgtgttatacataccttgatcttccgtataacttgcagaaacaaaataacgagcagtgttaccaccaccattcatgttcaagttagcgcgataactccatgctccgttttttaggatcaaatccatccagtccacattcggatagaaatccggatccatttgtgtacgaaataactctaattcttccggttgataggccattcctaaattgcgagtcactaatgcttcgttcatcagactggcatacgaaagaccgtctacaaattccggagtgatagtacgcgtattataagaagtttctaccttggcatcaatattgatttttccagctttaccacgttttgttgtaatcaatactacaccatttgcacctttagaaccataaatagcagtagctgacgcatctttcaatactgtgaatgattcgatgtcttcaatgttaagttcatccaaactgctacgttcaaagccatccaccagaatataagcacttgaactagctccaaaagtagaaataccacgtatccaaaactcagaagtactttttcccggttgtccggaagtttgtcgggcaataatacccggaacattaccggccaaagcgttagacatattggaagtagggaaacgttttaaatctcccacattcacattggttacagctcccgtcactgtcagttttttctgtgcccccataccagttaccacaacctcatccagtacactagcctctgattctttcatctttacattaacagtatgctgttcttttacaagtacttccacatcatcatatccgatgtatgagaagactagtcgatgataaggttccatctttatagaaaaattaccattgatatccgtaatggttcccaaacctgctacatcctttacagtgatattaacaccaatcatcggctcatcttgtgtgtcggtaaccgtaccagtcacggtaattgtttgttgtgcagaaatcgtcaatgggacaaccagcatcaacaaaaaaatggctaaatattttttcataatctgataaatgtgtttattcgttagattccactgttgattcatcttccggtatattctcgtcaccggctacattctcttcttgctccattgaaatagtgcgaatagtatgtcccacctgatcatgtacataaaacatctctttcacatcatcataaacaagtccacttacatcacggaaacgagccacttctcgtaggtcaccatcatcagttccccattggtttccgtcagctaaggaagttgacgctcctcgtcccgcataggtcgatacgataccttctggagttactttacgtacacagaagtttaatcgatctacaaaatagaaatcatactcttcttcaccagtataatccggatttttcacaaatactccttgacaaggattattcatacgtgcctcagttcctacatcatccctataacctgactgtttatatcccccgacaaaattatacggggtaataaattccttttttatctcgtcatagtcggaacgcatgaaataatgattgttaatcacaccaaaataagcatactttccagtaggatgaatgaaaatctgaaattcccaacttgggtcagcaatagtgaataactgcttaaaagtattaggattgttctttactataggatcccaacttccaccattcttaatagttttaaagtaatcaaccaagtctaaacgaaatacttgtcccttttcataactattaaaatacaattctccgttgattggatgaatagtagctccattacattgtttgtaagcagctatcaattgtatatcagatctatcatcgaatgtaccatccgcattacgtttaataatatatacactaggactttcatctcccttaccatcataatcaatagctacaatcatatattctgcctcatcagcatatccttctatcttcttattgaaagcaatgcttcgtatacgattagtaggtatagtattgatattcaaaggagaagaaagcatacgattttttaaatcgatcaactgtatagctttatgtccatcgtaacaaatatacaaatgatccttattcaacggatcaaaagctaatcgtccgttatcgctaaagccacagcatttgacaccttccggtccatcaaatggtccgtctctccaaccttgatcatcacgattattgcgatagccacaaagcgtacctacaaccatctttttctcatagctaaaagtagtactcgcagtcgttgttactgcattctctccttctcctacagtgatttcaatttcaccactaaaagctcctgaaggaacaaaacagtaaacataagtactttttacattaataacaatagcatctttgccaccaatcttcacttttaccttcgaaacatctgttccgaaattttcaccataaatcaatagtttctgataggctcctccttctttcggagtaaaatcagaaattgctacaggttttgatggatcaaaggctccagtctctacattgtcatcgtccttacaactacaaatgcaaatcgtgaataatgccagcaatatccaccgccattccttcaatacttttttcattttacatttcatgtttttcattctagttaataataaatgtatagttaattaaacatttcatcgagttttgtccattaacacttgcatccagtatcctccaataaccgaacgcgctttaaacccaacccattcaccactgtctgtgtgatgccaatcactgataggtacccgcgaagtagtttcattgatatatttatagagtggatctatgaatttcttgaaagtttctaaatctgaagacatagcagctgtccacataatccagtcagactttgtatactctttgcgggagtccaatggcaatccgtaaggattctgtttcgtcaaataatagttaatttctttgtcgattacattatttgggaataaattcaaattccacattttgtcccaaatcatattatatttctgactccaggtattctcacggtcgaaagcaaggcggtaatgatcaccttcatttgccatttcttcccatttcaccgccattttcttggctatacctgcatatttctctgcaacatcatataaaccaagcatatgcgccatttcgctatatccggctacacccatgatcgcttttactgaaagattggcattatgggcccaatgaccggcgaagtcatccgtgcataattggttcttcgggtcctgtccaaaccgtacacccttgatctaatcttctataaacaagcatattacatcgatcgatgttgtatttgtgttgtaaaaagaagattttccttatgctttcaattatttttttatcaagaaaatagaggagtaatttagttatagttcagactagatgtatttaagtataattttacaaatgagtgtaatgctgacaataacatttttaataatgacaataagggaaagtaagtaattgaattgtttcattaatttaaatagaatgtttaagagacacttatagcagtagcctaatggagttgtaattttgaagataagatttttgaggaagaaaaataaaagtgctacttgaaataaatggttagattctttttgaatttgctgctgtttactaattgcatatttatagaaatatttcttattcatataacattcatgctttatagaaatagatttttccacattaagagaaaatctatttctataaagttaaagagatattcctgaaaataccaaccaagattattctaacctagctatcccctccattagcgaagccccgcttacttgtgctcccattgaagctggttcactggatttccacatttcaccccaccaataattgcaatacatcgctgggtaagccgcatgattcaaattcatgcgcaaagtttcagcattatttttcagaaaggttatcaaatgtttgcctatagaactagatgcctcgtctaatgcaaggttcactgcatatggaatataaacagacttaaaaatactttggtccatactgctgccttcgtcacgtaaaataccatttcgtaagcaacgatcgcttgtagcggcatagttgatcacttgttttgctttgtccatgtatttactttcttgtgtgatatggtatagttggcgacaggcttctccaaatgttccctgtgtataagtcagaggtggttcctccactcgtccatcggcattatacgaattattgaccacatactcgtacaacttctttgcatcagataaataatttccatcttcatatcgttgatagagtttagcagctaccagacaacccggagaattagtgcaagcattacggtcgttttgggtggtattccatggaagtcccgtacctttatcatctgtccatgctcgagtaataatgtatttgtcgtatacaattttagcggtttgcgcaaatttttcgtcacctgttgcttcggagagatgtatcagagtaaggcaaatccagcacatgtcatcagtaaagtcatttaggaagccggtttcatctgatggattacggtggtaattgttagcgtggttggcataccagcgttcaaaataagtgcggtaagtagcagccaattgcttatttgtgtctttaatacgtttataagagtaaatcactacatccatagcatgcgcttgttgccagtagatataagtcgattcgtccgacatatctttgggtgtactccaaaatgtacctttacttttattcatgaattgctctattaagacatatgtacaactgtcggcaagagttgcccaagaaaaagggacagtggtttcagcaggtgtagcaattactgttactgctgacgaacgatgaccatagttatctattgctatggcagaaatctcatatgttccgtactgtggcaattgtaatgtatagtttccagttttcccagctgctccttgaataatttgtttcccgttatgtgtaccgccattcttttgcaaataagaaagttctacaccgagtaaattaggagtattcggattttgccatgtgatcagtagttgattagcaatctgtgtagattttgcctccaagttagttattggagaaactgttatttcaggttccttgttcctttcatcatttgtctccgagtaattatcgtttcctccttctccgcaggagatagacaggcaaattaagcaaattatgaattgaagtaaataataggtctgtgcgaattgtttcataatataaagctttagaagttgttgaaaattgtttccaaatatttcagtcttgcaatataccaagactttatgtattctgcttcctcttcgggattagcatatccatacatagaatatcctgtccaccgttggcgatctcgttccaatgcgcctgattccacaatctgtcttttatagtaatctactttagaagccaggtttgccgggctgagaacattatctttaaccgccatcaagcgttcgtatatccggcgtttgatattgttcgggttctcgttcataattctctcaaaggggcggaagtatttggaaccggcatcattacggagtattagcccgttgtcaaaaccaagacctttttcgggatcaagcttaatggcatcccaagtgcgtcccagtgtaccatccaagtcccagggctgaataatgaacttgggtaataaagtgagatttacattgtatataccccaaaaaacatttcgtcctgtgttatcataagctgacagcagattaataaagataaaataatcaatcagagaggaaacatccagtcgctcttcatattgggcggcaaattcttcttttgatgctgcagcgaagaactggataagatcggaaagatatttaaattcgatttcacccacctcgtccggataatcggactcaaatccctgccatgcctgtttggagttactatatggagtattgattccttgtaatttacattcatccgtccattctttacccttatagagataaccacctttctttttcattttcaactgcttacgatcgatacgatcgcttaaaatatacaaaccatggtaagctccgtccaagatcatttctacaggatagccatgtgtagcattcacagcctcgggttctgtattactataatataaagtgttgaaatcgttccaaagatcaaaacaaacacgattgcgcattttgctacaatccagccacatagcatccagtatccatgattgatcttctcgcagacctaatagctttgcgtcttgattttcattcgtttgacggtttttcaatttaaaactgaaagacttcttggcataacgtaaagctcctgctccacgaaactcgataccggcatagctctcaaatcgtaagacagagttgttggtgcgccgtttaggatcagtcagcactatgtcacacgggcgtttattctcatcctcaataccttcaggagcagagatctcaatcacgggaacaccagttacaatcaatcgacaagacctaattttatcaatagtattgttacctgcttccatttctatattttgtccgggattcaggctcagtgctatattctcgcccgacttaattttcttatctccgatcttgataaagtcgactccaatgccgccaaactcaactttgacctttgcaggttgtacggcatccatatctataggtagataatacgaattgttcacataatccacagctgtagttactccgtcgatagtcagattcaacaaacgaagataatcttcttctccttctatagacgattgcataacggtaattcctttttcttcttttcccgagatgattgcaatccgtccatttcttggtaaaccggaagtgttttttttgactttgattcgaaccttagtgatacctatccctccggaagaaggtgagagcgtcatccaatcgcaatgtatacttgattgccatgcgccgcctgaagatacgttgacttcttgttcaccgccttctatcgtcattgctacttgataaatggatagagaaaatggtaaagtagtgtacacatcgttttccttatccgaagaacaggctgcaagcagacttaaaatcaataaagccggtagtattttataaagattcataatacagatctaaaatttaaatgtatatcctgcgccaatcacatgtccatttgcttcatcctcatctgcatgattctgatacaaatagtaaaaatcaagtccgtggtgtttgctcaacttccattctacacctaaggtccagcgtgttttgtcaatcgcccctttatcgttaagcaaatgagtcaattcgcacgaagcgtaaggagtgagactgcatttaggtatattgtatgttgcttgcagacgagaacgaagcacgttctttcctttacctttcacgtattcatcgtctttaggactaccatcgtcaccatcaaactttgatacagactgactgggtcgataggtatattgccaacgctcccgaagtgaaaatgtgaatctatttaaactcacttttcccgttagttggaaatagaaacggtgtttgggttgccaatattcagggataacattccctttgtttgtaatttcagaagggtgattataatagatgtaagtgtatgctgttgcggctttcagccagtttgttattttatatgctacacctgccgatcccgaccaacgtcccacttcgcttaacttgtcgcgtgaacggaactctccttccagcgaaatatcaaagtcccggaataatcttttttccatccccacactggtccatagacccaaatcgtctttttgtgcttgtaaagcaaaagatacaagacaaaacaaacctgccaaaaaaagtttcttattcatttccacgtggtattttggttaatgtatcaatcgtatttatctcatttgtcatcggttcataatagattttaagcatggcggcatcgcgaagaaagtcaatgtacccaacttccacccgaataattttcagtccggtacgcgctttaatatctgcaatcaattcttgttcacacgaggatttgataagttcgattcgatcatagagtatcagtttacatgaaacatgctttagccaccgattactctcacacaaccagatacataatacaaacaataaattagctcctattagtccgccatagtttacttccacgcccaacgcgtttattactgatatggcgataatagcaaacagataagtcatctctcgtacaggcatggactcagtccgataacggatgataccgaaaatagcaaataagccgagagcaaatccgacctttaactttacactacccagcagaaatatcatcaagaaaatgctgatacttattaatgtgaaggtgaagtgataatctctccgcttgctctttggataatagaaaaggtggataataatgcctgttaccaaaaagttgaagccaaagcgcagcaataactgcaaaaagtcaccaccgtctatgagtggagtttctattatatcaagaaaatctaattcatccatatataagtatgtttttatattgatcattaatatactcccattttattcagcattcgtaactttggtttcagccgattgcattttaaatgtgacactgtaagtgctgaccctatacaatatttggaaaatccggaagattgtatatgtagtttacgtagtatctctttaataggtgaagaattgtgtccatctcgtttcagctcaatgataacaatgttatccaaacttgatatttttccactttgtaagcaacaaaatgttactcctgtatcaattgtaaggcgctcggttttatgtttattaacaagtgtaatacggcgaaatgagttttcaagcaaaggcagaagttgtgattgctcataccaggcatgttgacgtaaaaatgcttcaccaccgtcttctttgatcgtgtcaatactcccgatgcggattctcttcttgtctgttcttcccttattatttttatttttcacttccaaaaatgtgagatctgaatctacgtatgtgcgtatacggattttctcccgtacgacccgtccattctgatgagttagatacatgtcacgatctgctgtatctaagtaaattgtatgataagcaatattgtattcaccgttcacttcttgaacgcggtagtcatgtccggcagcaagaagtatctcttttaatatttggtaagaggtgacatatttggtatcagtacggttcatcagctttatgccactcatttcctccaaagatataggaatatattccttgagtgtctgcagaatctcggtcatgttaaagatagtattagaataaaaagggaaggtaacttcaaggttaaagtttccttcccttctttttttaaattagcatcgtattagtcccattcaatagcctgatctttatcaggtatctgagtattaatgttgcgctgcatggagatagtaccttcaaaccgaaactttattctggctcccggcgctaaagtataatcttcaaattcatagtcaacatcacgaatcataacggtacgtctcaataaataagggcggacagcatccatctcttcttcgatataactactagctcgggtatttattttaaaaccattgttttcggagttatcacttgtcaactccacaatgttagtattcggaacaaaatgggctatgattttgtagtttctacggtcctgtcggctttcgtcaattgtacctgcatagaagaatatagtttcatcatcaatagcataagttactatttcacttttcaccaatggctcattttctcctgcacctgcatctaccaacttgccttgtaagttagtaccaccgtatgtacccgaataatcattaaaaggcatgacgcggagtaatgctttacgataatgcttacgataattcggtttgtattcaccatttggggcgtcttcaatagtcagcggtaatacccacttatcaactaaatccagtccagtcagatcaaactctatatcaagatagcctacattttctccagctttaatctgcacggtttcagggaaagagtaatgtttagagggcatttccctataccaaaggtcttcgcgactggaaaagcgagctatgtttagtgttcgcaaggtatccgcgtcaatcccaatttttacggttatatcgcgatcgtttttagtcgatccgctgacaaggataggcaatctataggttgtttttcccgtttcgctataagacaggttaattctagttaccccattgctgttaatcggtgctttgaatgaaatatagtgctcaaactgctcctctttccattcgtcattacaggcactgaacatcactaatacaattagtgaaaatagtaaagtatatattcctttcatatttattaccatgtttaagattaatcattgtacgtccagcctggattctgagtcaggcgcttattacgtttcaattcgccatgtgaaatcggccaaaaccacattttatcagagaacgtagcagacaaattccaaacagcaatcggtgtatggaacatttcgcgatccgattctgtcataagtgtattgcaaccgtaaacgggcattgcctcttctacccgtgcatctttccaacggcggatatcatagtaacgctttccttcccccatcaactctatttgtcgttcgcgtttcagataaatacgaaaaacatccttgtctgcatatatattgttatcgaaatcgggtacaccagcacgcatacgtacaggcttaattccttttctcatttcggcaactgaacgatgaatggaatgagtcttagttccatcccaagatggaatatcatatgtaccttcactcacttcattgatagcttcagcatacatcaacaaaatgtccgcatagcgaattgccggctccggcttatatcgaaggttgtcgatactgttattttgataggtgtcatcgggatgcacatacttcatcactcctatacccgtgcgcaaccaaaacatacctgcattatatccatccctttttccgcgataatagaatatttgtttatttctatctgcaatttctttttcattacctaaataccaataagctccgttatatgcaactgaagcatagaagcgtggttctcggtcggcatattgcaaggaaactccggcagcaagtggtttatgttcttctgcagtagtcgtgaaacctgtagcacgcggacgagtgtctaaacgatgattgttattatattctggtacattcgcatattcagagttcatacccggacaattgcttccgtcgttcatatagtaagcatccacaatcttttgagtcagcccacttgtattccatccggtagcggtaagtggtaactggtgaaccaccatatccctgatactttgccctccaatatttctaccccggctaaaaattaattcaggattacttaatatatctatttgaccattgaatacagaacggtaagattcgaacgggtcaatgtctttccaaccttctggataattggcattgctatatacttcatgatatgggggattgattgttgccggttccgctggcgaatctgttgtacgtctatcagccgtatataactcatatacccctaaatccatgacatctttagcggcagcagcagcttttgcccatttttcttcgctatattcaggagaaagcaagcgattgcctttgtcatctaccaatagttgggcgaattcatcattgttaccattagctagtgggctggcagcataaatcaacgctagtgcacgagcagataaagctgctccacgagttgggcgggcagcagaattctgacctcttgttagagccagatccttagctgccaaagccatttcctgactgatataatcagcaatctcctcataaggtgcacgtggagtagccagttcatcgtaggatgcgtcataatcaagtccgttatctggcaataaaggtaccggaccatatctacgaagcaataaccaatagtagtaagctctgacaaagcgggcttgtgctttatagtcaagccgttcggcttcactttcaaatttatcgttcatgtcgacatactgaataaaaatagtagcttgtcggattccctgataacatctttcccacataccttgtttagtattctcatcatacaatccttctttaaattcattatatgacaattcaccctctttggattcttgtatggaaccgtcatcatcaccgtaatacatatcatccgcaaaacaatgtggagtgactcttttgttacaaacatcagcacaagcatcgcttagataactgaacgcatttgctaaccaggcttctgttttatctctgtccgtaaaaactttttcgatggtttcccgatctctaaaaatatagtcagagtctaaatagtcagaacaggattgtatgcttaaccctaaaactgatatcaatagaatatatagttttttcttcatgttgtttattattttataaattaacacttatacccatagttatcgattttgttaacggatatgattcacctctgggatcgcccatttcaggatcccaagtcttgaaactagaccatgtcaagagatttgttcctaccaaaaaaatacggatattattaaagtgcatcttgttaacaattgatttggggagtgtataaccaacatcaattgtttttagtcgaaggtaacgaccatttttcaaccagaaagtagagtttcggtagttattattgctggcattgtcaccttggtagctcaaacgtggatacgaagcattaggattttcattggcaggaatacctaatgtttcagctgtatcagcatctacccatcggttgtccagcatacctttaaaaatatttccccattcgccttctgtaaaggcccatacacacttgccataagtgaaaaatgttgatttacctgctccttgaaagtggacattcacatctaaacctttccaagaggcagatgcacctaaaccataaatcagatttgggcggctagttgcaccgatagctacctggtctccatcattgatcacaccatcaccgttaacatctctatacttgatatctcccggttgtacctttccccaactttgtgtcgggctattgcggatatcatcgtaatctttgaataatccttctgcgattaatcccttgcattggtccacacgatagcctctttgcatctgataggcatatacattattctcctcatctctttccagtacttcatttttactataagtgatattgccacgtacagttaagttcacgtcattgattctctgtttgtatgagaagtgtccatcgaaacctttagaacttacagcacctacatttgctgccggattatgcccgttcaaaccgacaatctgaggtaagtagttacgaaccatataaattccggtacgtttttcatcgaaatagtcgatcgttgcagtaaatttatcattaaacaatgcaaggtctatacctaagtcattcttttcagcaacctcccaagtgataccattggaggctacatctgcaaatcctaaaccaccaaacgaataacttgaaggatattgtgcccaatcgtatcctccataaataatctcattatccccgtttttataacggtctgcaatagtataaagataggggaatcgcgttccgacattatcattacctactttaccataagagaagcgaactttaaacatattcatccatttcaaatgttttttgataaacggttcttccgcaatattccatgcaagagaaaaagcagggaaaaaaccaaaacggtcgcctttggcaaagttttcacttccattatagccaaaattaaaatcaataaaataacgataattccaattgtaagctacacgtccggccaaatcctgattacgtttgttaataccagtcttcaaatcttctcctaaattctgtgtctgaatgtaagagtcttgtgtatactttatagtagcgctagggtgatgagctccaaaagaacgatcccagtttagcatcatgtctaggaattcccgacgattaccgctagaactgctttcctgtttcatgttctgagaaccactgatcttcttccatcttaattcaccagtttccggatctctggcacgttctgccaaccattgttctggccacttcagacgacggatcgtattttggttgttgctgtcatagccaaaacgcccaacgaactttaatcctttagttatgaaatcaaaattttgttccaaagaaatatttgtttcaatattatttgtccaattttcattgaatccagtttgggttgcagctacccatgggtttgttttattgccggatccaatagctggtatatatccgttggaatacataacaggggtcttaattggattatatccgaaaagttccccccaaacatcaccatcacctaatcccggactattacgtttggataagaatcctgctaccccgactttcaataaggttgtttttgtaatgtcaatatcggtattcaagcggtagttccaacgatggtaagctgcattggtattataatcatctttcaaagattcatctgtattatacataccatcttctttcacatagctagcagaaacaaaataacgggctgttgttccacctccactcatatttaagttaatacggttactccacgcaccgtctttgagtaacatgtccatccaatccacattcggataaagatccgtatccaagcctaaacgtaagatgtccaactcttctggtttatatacagcctcgttgttacgggtaattcgcgattcgttcatcaagctggcataagtaaatccgtcttcgaactttggagttacagtcctcgtattataggttgtttctactttagcatcaattttgattttaccggcttttccgcgtttagtagtaatcaatactacaccattagcacctttcgaaccataaatagcagtagccgaagcatcttttaatacagtaaacgtttcgatgtcttcgatattgatttcatccatactgcgttcgaaaccatcaactaatacataagcagatgagttggcaccaaacgtagatataccgcgaatccagaactcagatatatttttacctggctgtccagaagtctgacgcgccataatacccggtacattacctgccagtgcattgacaatgctggaagatggattacgtttcagctcaccaacatctaccgttgtaatagcacctgtctgtgttagttttctctgaactcccgtaccagtaataacgacttcatctactgctcttgtcacgctttctttcataacaacgtttattgtacgttgttctttaaccattacttctttcgattcataaccaatataagtgaacactaactggcggtaaggttccatggttatggagtaatgaccgttcatgtctgtgattgaacctaaaccgggcatgtccttcacggtgacattcacaccgatcaacggctctttggcttcgtctgtaacaacacctttcacaacaactttttcttgctgcgccataaccgttgaacaaaggcacaacagcatgatacataatgataaatattttttcatattattcatgtgcgttttaatcattagttattcttctccttcgtaagcaatcttacggatacgccgattggaaccatcaccgatgtaatacgtatcggttgcttcatcgtaagctatacctttcggacggtcgaaacgggcctcttgacgtaaatctccatctacatatccccatgggttaccattcagactggcgcttccgcgaccggcaaatgttgagacctttccttgcggggtaattttacggatacattgccccatcttatcacaaagaataaaatcgtattcatcttcttgccctgcatactctgggttctttacgaaaactccttgataaggagtattaaaacgtgcgcttgttccaattccgtctacataagcagctctttctgctgttcccgctacaatgaagggagtgacaaatcgtttacttgcccaatcataatttgtgcgctgaatatagtgtttgttaatagacacaatataagcataattccctgtcggatgtatacggatattatattcccatccattatccatttgaaaaagtacttctttatcagcaggagttgtacgtgtaccgtcgaaaatttcttgaatttgttgcttctctactttgaagaattgccccttatcccaactattaaagtacatatcaccatctaccggatgaaaagttactgtattacaagctttgaaattaaccaacgctaatctgtttccccacattttataattgcgctcatcgccctcaggggcttctctattacgtgtaaaaccatatacagctgctctcaattcgtctccttggtcaactgccacagccatgtgattttcatcaaaaaaggcaagtgcacgtccgcggttagtacctcccatgtcaccttctgtaagagccgttcctacatattggtttttgaggtcgagaatacgcatattaccgtttccttcattttcatcacctgcacctctatcggctgcaacgtacactaagtggggatatttagggtcaaattctaaccagttgggggaaccaaatgcaccacaatcattaaatggaccatcttttgtatcgtatccgccgtcatctctacgcgaaccacataatgtactcactaactgttttcgcacatattcgaacttggcctctgcgatagtagatactaccggattgtcgccattggatatttgtacttcgatttctccggaataagcctgtgaaggtaccaaacagtagatagaatgatttttcacattgattacgatagctttttttccaccaacaaagacattcacaatagacggatcattaccaaaattttctcctgatataactaatcgctgcccgaatccccccgtagtcggattgataccacttacttgaaccggaatattcggatcaaatgctgcattgtctgaatctccgttgctgtcattgtcatcactacaacttccgaagaatagagcaactagcagtaatgccatccagcatacccgccagtagtctttcatgattttgttttttttcatacgtaaaaaattaatgattaataaaatattatattgttggttcattacttatctcttgttgtattatgctgaaatgattcatccatgcgaaaaagtattctttcaacttattgtccatatttttaatgattcatcttatccattaacacttgtatccaatatcctccaattacggaacgtgccttaaatccggtcattctgccagttttggtatcatgccagtcactgataggcacacgtgaagtagtttcattgatgtatttataaagaggatctacaaacttctcaaaaatttcacggtttggagacatggctgctgtccacataatccagtcggattttgtgtaatctctgcgggaatctaatggcaatccatatagattctgctttgtcagatagtagttgatttctttactgattacattattagggaatatattcaaattccacatcttatcccagataatattatacttttgactccaggtattattgcggtcgaaagcgaggcgataatggtcaccttcatttgccatttcttcccatttcatcgccatttttttagctatgtcagcgtatctttctgctacactgtttaatccgagtatatgggctatttcactatatccggctacacccataatcgcttttattgaaagattggcattatgagcccaatggcctgcaaaatcatctgtacaaagttgattttccgggtcctgtccaaacgacccgcaaacacattaacatcctattaattaatgaattatgattgaattgtattgcgtttgtattgtaattctatgtattatacatgaataaataagttacagaaagaaaagaattataggaagtatgagatacttgtcttatatattagaatagcagttccttatagatttatttaaaaactttattttcatctgtctaaatgctctaacgatgtaagaatgaagcatatctgtttggacatgaacataaactctataatattaccgatagtactttatatggctagatatcagtaacttatagtttcctgtcatttcttggaatggaaactgtcgtttcccggtgagggaacggacgttccttttaatggaaacgaccgttccttttaaagggaactggcgtttcctccgaggaaactaacgcctgttgtcttattctgatgtgtactggttttagttgacaacttcgtttgttataactgaattagtttactcaatatactttaatatctaaataggtttacttttgttattcttattcctatgttagttgtcttttgttggtgcttgcaaatttatgcatcttcctttatttacgcaagccttcttcaggaaaatgtaatgttgccaacaaccaaaaactcttcggtcggggatcgccctagcggcaaggggcgggaccacccgtcccgacgagcgggtattatgctgttaatcctcccgtttcgctgaccacttccataggtgtcctcatgtttatcccttgatgaggccgcacatgattatatacatatacagcatcttcaatgcgcttgcttacttgctcgaagctctcatcatcacagtcgaatagccaaccgtttttaatggtgttgttcattctttcagccaatgcattatgtaaaggatcaccacactgcgtcatactgatgttgatttgatgctctttaagcctctctacatatttatttgagcaatattggacaccccggtcggaatgatgaataagagtgctcatgtctatgtgatacttctcatagaatgatattgccatctccaaagctttcaagggcccctccgtctcaagagttttgtaaagcgcatatcccacgatggcacgacttgacgcatcggtaagcaacgagaggtaagcccagccctgaccggtgtttacgtaggttatatccgccactaccatagcgcccaatcttgtagcgacaaatttgggtgcaacattcaacagatcggggtagatatagtaattatggttcgaattcgttgttttaggacgcttgcgacttgtacgttgacacaaaccattggagcgaaaaatgtcatagcaacgatcacgaccgataaccatctttggtccaaacttactcacgcagcaggcgtataactcgcgcataccagctttgggcatgagttccaacagttctttgcagtacaacacgatgcttgtggtaaggatatcaacctccaaatgtcggttcacatgcttgtaataaccttgtcgggttatgccgaagtaatcacagaggaactttatacaaccacgtttgcgtcggggtgagtgcctctgtgacaaggtgtcgattacttggcatcggagttttttcgtaccttgatatgatacgtggattcagcaagattgatgagttcttcgcacgcctcgtgacgtaaactctcatcagcaagagcccgatgaagtttacggttctcagcacgcaatagcgatagttctttctggagctcagaaatactagaatcaatagcatcgctatttactggtttagaggatctacccatatctttgtcttctatttgatacttgttaagccaataagtaagaagcttggcacaaaagccgtgacgcttacaaaactcagatttgctctcgggacttgataaatactcacgaatataagacattcgttcatcatcactgtaatagttgtactgctttttcgaatatttcatctttattttcgatttttgaagtgtcaacttattcagtacactacattctaaaaatggttatagttttatctccctaaggaattcatctggctaatttggcacgcaactcttttagtcttttagcagcctgctgattatccactttaatatatcgcataaacgcagatggacttttatgtccggatatacgcattagttctgctgcaggaaaaccagatagatacatgtttgtacaaaacgatcgccgacaggtatgggaagagatcatttcccatttctcatataccctcttttctcgctctttacctttcctgcggacaacttcaatcttttggctcaattttatcttccgccccaactctttgactctctcattaaacatgtatcgtgggattttaggcaaatcataattatattttttaagaatctcgggcacataatcaatcatgggaatcactacagccttgtgtaccttccgctgtttgagatttatattctcattatccaaatcaatatgctcaggacttaaagttgaaaggtcactgtatcgtaatcctgtgaaacacccggtaatgaatacatcccgtatctcttccaattgcttatcatctgataaatcaagttcgtatattgcagccagctccttttcatttagataaatagcatcggtttcctcttctacaactttgaaattctttaggtcaatcggtggaataattccttttactatttgataattaacaaagcctttcaacaaacgtatgatttttcctgcagaattggtgagcagccctacagttccgtttggttttactactttatgaaatagataatccataaactcgttgtaaaatgtcagattcaagttgcggaatgttacaggttgtgatgagtattctttgaaggcggtcagatgcttgcggagtgttcgatagtcttttatttgatctgcagagacggatggtgctttttccactatataccgttctaatgcatcaaacatatctacccgattaggacgcagatcatattccctgttcttttctaattcaagcaagacaaaatcaactgtcggatctatgccgtttactttagcataggtgagaatatcaccgagcttagatgttatcttaatcaagcaggcatcaatttcttcataatggggacatgcacgcttaatccatttcctttttgcatcccaatgttccggtttgatattgtatccggtagagataagcgtgcgcttgttccgattgtaattatatcgaacataaaggacagtagttccctcttgggtaacgtacttgggtttaatatatggtatatattttgcgatggtataatcagtattgcattcgtgttgcaaatttacgaaagctatctgaaatgaccaatatctcttttgttaaagttagaagtcatcaattaatagaccttcattttgggttggtaaggataaaatctgctcaaaaaaggataaatactgctcaaacaacgtcagagcccctattccgtatgttaaaagaacgtttgaaatccaaaaaagaatagattttgtcctttcttgaacacagattttccttgtttcttctattaattccattattttgtgtcatcaagatgagatactatggaaaataaagagtttgttaaagctcgatatttgctagaaatacacgatttgttagccgcttctccataacatttcatcctaaatatgacagtactgatattatatattaaaggtataggaaaacgggtataaagattgcaattattcaaaggtgagatagtattaaggtaaaaagtggatttaaaagaatacttagggcttgtttttttatgaggtaaataagattgatggatggataaccttggatttgaagattaatttaaagcaaatatttatgaagaaattgctagccataatggctctttcagtcggcttgttggcaaatgcccagaccgttgacttattaaaacctgcaaaagatatagcgctacgtgctccgtcggtgcctattatcgtttcagatccttatttttcgatctggtcaccctatgataaattaatggaaggtagtacagagcattggacaagtgcgaagaaacctttattgggtgctctgcgtgttgacggaaaagtatatcgttttttggggaaagataaaattaatctggtacctattgctcctatgactaatgtagaacgttgggaagcagcgtacactaacagccaaccatcaaacggatggcaagaatttcagtttgatgatagcaattggaagaaaggtaaagcagcgtttggtagtcgtgatatggaacgtattcacacagaatggaaaggagacaataccgatatctacattcgtcgcactttcgattttaatgaaccgaatatcgctgaagatatttatctgatctattcccatgatgatgtatttgagttgtatctaaatggggaaaagcttgtttctacaggacttgtctggaagaataatgtatatctgaaactttcagaagaagcaaaaaagaaacttcgtaaaggtaagaacgtaatcgctgcccattgccacaatactacaggtggttcatatgtcgatttcggattgtttcgtgagaaggaaaatgctgttaagtttgcaaatgaagctgttcagaaatctgtagacgtattggctacttccacctactatactttcacttgtggtcctgtagagcttgatgtcgtgtttaccgctcctcaattaattgatgatcttgatttattgtcaactcctataaactatgtttcttatcatgtacgttcattagataaaaaaactcatgatgtacaattctatatggagacaactcctgaactggctattaacgaaagtaaccagcctactgttgctcgtaccttatcaaagaatggtatcagttatgtagaagcaggttcaatcgatcaaccaatatgtgaccgaagaggtgacttgatttgtgctgattggggttatgcatatcttgctagtacgaatggatcaggtaaatcagtcagtttgggagactattacggaatgaaagaatcattcgtgaaaaatggtacattagccactacaaagactaaatggacaactcgtaaagaggaagataatccggctatggcatatgttcacaatctcggttctgtctccaatagcgggaaagaaggattcatgatgcttggttatgatgacatttactctattgagtatatgtacgagaagcgtatgggctattggaagcatgatggcaaagtgactatcttcgatgctttcgaaaaattgagagacaactatcaggctattatggaacgttgtcgcgcctttgacgaacttatttatgacgatgcagaaaaggcaggtggcaaaaaatatgcagaaatctgttcggcatcttatcgccaagtgatctctgctcataaactctttactgataaagaaggtaacttgttatggttctctaaagaaaacaacagtaatggttgtgtaaatacagtagacctaacttatccatccgcaccactatttttggtttataaccctgaattacagaaagctatgatgactagcatctttgagtatagtgctagcggtcgttggaacaaaccttttccagcacacgatttagggacttatcctattgctaatggtcaagtgtatggaggtgacatgccaattgaagaaggaggtaacatggtaattcttgctgctgctattagcaaaatcgaaggaaacgctgactatgtaaaaaaatattgggatctcttaactacttggacaaactatctcgtagagtatggacaggacccggagaaccaattatgcactgatgacttcgccggtcattgggctcataatgccaatctttcagtaaaagcgatcatgggtgtagccggatatagcgaaatggcgcatatgcttggtttatatgatgttgcagagaaatatgcaggtatagccaagaaaatggcggtgaaatgggaagaaatggcaaatgaaggtgaccattaccgccttgctttcgaccgtgagaatacatggagccaaaagtataatatgatctgggataagatgtggagtctgaatttattttcgaataatgtaatcagcaaagaagtcaattattatttaatgaaacagaatccttatgggttaccgttagattctcgcaaagagtatacaaagtctgactggattatgtggattgcagctatgtctccagatttagaaactttcaagaaattcatagatcctctctataaatatatcaatgaaacgacttcacgggtacctattagtgattggcatgatacaaaaacaggcaaaatgacaggttttaaagcgcgttcagtaattggaggatactggatgaaagtattaataaataaagtacaaaacaaacaataaaataaataatcgttcaaagttgatacaattaaatagaatgtgaaataactcaatatattttaaacatccacccgtattgtactgattctctaaagtataatacaggtgataaaattaatttgctatgaaaagtaaagaacaagtgttttggtttttaagccataataagatgtggtgtatcccactctgtctggctgcattttcattattacctggtagctatactcatgctgccagtataatagatgaaaatacattaatagtaaactctacccaacaacaacgtattgtaaaaggtactgttattgatgccaatggtgagccattaataggagtcaatgtaaaagaagtaggggggagtactggtacaatcactgatataaacggtgagttctctctaaatgtagctcccaaaacaaaattagaaatttcttttatcggttatcaaacacagaatgttactgtgggagaggcgagacaaattactgtaaccttacaagaagatacacaagttctagatgaagttgttataacaggatttggtatgtcacaaaagaaagcaacattgacgggtgctgtttcttcaattaaatctgaagaaattgctcgttcttctgctgttactgcaggtggagctctggttggtaaaattgcaggtgtaaatactcgtcaacaagatggacgtcctggcgctgaaacagctttgcaaattcgtaacatgggtactccattatttgtaattgatggtgttatttcagatacagggcaatttagtcagatggattttaatgatattgaatctatatctgtactaaaagatgcatcagctgctttatatggggtacgcgcggcgaatggagtagtggttgttacaactaagaaaggtagtcgtaattctaaaaatacagtttctgttaatgcttattatggttggcagaaaaactctaaatatgttagtccagctaatgtaaaggattatgttcatgcctatgtaacagcagaaacattctctggacgtaatggcgattctcgtcgttacagcaaagaagaatacgagaaatggatgagtggtacagaacctaaatatcaaggatggaattgggaagactatatttgggtaagcgctccgcagtattatattaatactaatttctccggaggtacagataaagcaaactattatgtagcggtatcccacattaatcaagatgcaactatccgcaattatggtggattccgtcgtacaaatgtacagatgaatatcgaaatgaatgtaaatgaacgtctcaaggtaggggcaagtatgaatggacgcattgaagatcgtcgtcatcctggagtaccgggagctgatgatacatggctgcctcgtttcgcaacaatgaaaaatcaaccaactaaacgaccatttgctaatgataacccgaattatccacagctagtatccgaccaaccggaaacaaactttgctattttgaattacgagactacaggaaaggtatcagatgtatggcgcgtaattcaaatgaatggtactgctgaatatgagattctgaaaggattaaaattcaaaggaatgctaggctactattatgcttataacgaactggataaccaagaattcacctatgaactatatggttatgacgaacaaaaagataattactatgtaaccaaccgtatgtcaaatccttatcgtgagcgcaaccgcgagaaggtagaagatcaattttcaaactttcagttaaactttgaccgcaaatttggtaaacatgcggttgttgctgtagctggatttgaggcaagtcagcgtaaacgccctaaaatgtggattcattctacaccagtttctaatgcaatggatttgattcgtctgaaagaaattcaggagtttaatgatgatggaaatagaacagaggcacgtatgggatatttgggacgtatcaattatagttatgctgacaaatacctagttgaattaatagctcgttgggatggatcatggaaattccgtccggataatcgttggggctttttcccatcagcctctttaggctggcgtgtttctgaagagaacttttggaaagagagcaaaattggtgagatcgttactaatttaaagttacgtggttcatatggcgaagttggtgatgatgctgtttctgactattctgcttttgactatctacctggctataattacaacagtgggggtgcagtaattgatggcaactgggtagtaggaacttcaactcggggactacctaaccaaacactatcctggatgacagcaaagattctagatattggcgtagatttaggttttctcaataaccgtttgaatatacaatttgattatttccgtcgtgtacgtgatggaattcctgaacctcgttatgatgtgttaataccgaacgaagcaggttttagtctaccaaaggagaatcttaaatcagatatgcatagaggttttgatgcttctattatgtggactgatcaaatcaatgatttcaattatagtgttgggggtaatataacctattcccgcttttgggattgggaacaatataagccgcgctttagtaattcgtgggatgaataccgtaacagcatttggcatcgtgtaggatatgtgaattgggggtatgaagctatcggtcgttttgatagttgggagcaaattgccaattatccagttgataatgatagaaaagggaatcgtacagtagttccaggagatatcatgtataaggatcaaaacaatgatggagtgatcaattatttggatgaacgtcccattgggtatcgtgtagatagtactcctactctcaattttggtattaatctttctgcatcatggaaaggatttgatttggcaatggattggaccggctccggtatgacatcatggaatcaatgttatgaaacagcccgtccgttccaaaacgatggtaacagtcctgatgaagtattgaaggatgcatggcatttatctgatatatgggatgctaatagtccgttaattccaggtaaataccccatggttcgtctaaatactgatgaaactagtgcttatgataaaagttcatattggttacataatgtaacttatttaaagttacgtaatttggaagtcggctacacattccccaaaacatggttaaacagaactggcattagtaatttaagactgtttgtttcaggcacaaacttactgactttatccaatttgtctgtgatggatccggaatgtgcatctgacaacggtttggattaccctccgatgcgagtaataaacattggcgtaaacctaaaattttaagaaacaatgaaaaagaaatatttatatacaataatgactgccacgatgttgtcattgggcagttgtagtggcttcttggatacaaagcccgatacgttattaacccaagatcagacttttggagaccctacattagttaaatccgtattggccaatttttatggacgtgtaacaataggacagcgtattgatgactgggatcaatggacaatgctagacgaggtaattcatttcgacacaaatagcgatgagaatattgatagaaacaaatggcgtacatatgactatactctagtacatgaccttaatcagttcttagaaggtattaaaccctcagacgctgtagatgaagccacgaaaactgcttatataggtgaagtacgctatattcgtgcatggctttatttttgtatgggacgtactttaggtggtgtacctataataaatgatgagatattcaattacactccaggaatggatataacaactctgcagataccccgttctactgaggctgatttatacgattatgtaatctcagaatgtcaggaagcctccaaaatgttgaccaaagacactaacaaaaactctgcacgagccaattattgggtagcaaaaatgctggaagcccgtgctgctttaactgcagcttcattagctacttataacacggccgaggcacatccgcagttgcgcacgaatggtggagaagtaggtatacctttttccaaagcccaagaatactataaaatagcgttggccgctgcaaaagatgttatagaaaatggaccttacaagctcatgctggcatcagagcaaactcacaaagcatatgcggacaatttctataaagctgtatgccaaaaagatggtaatacagaagtcatttggtgtcgtgattatgtctctccggggcaaacacatcagttcactaaaggaaacctgcccaaaagtatagaacaagatactggaagtgaccgtttatctgttttactaaatctagttgaggctttcgaaccacttgatgccacggaagaacaaaaagggacgagtataccatttgaaattggtacccttgaaaatccgaaattctttaccgaaccaacagaactattcatggaacgtgacccacgcctaatgggttctatcattgtacctggagcaacttttgacagtaaggttattgaattacaagctgggcaactgcgaaaagaaaatggttcatggtctgaagtgactggagcccgtaattcttatgacgaggatggcaggttgattacagctaataatggtcctttcggcggtaatgaccgagaaataaaccgtaccggtttctacgtgcgcaaatatttggatgctacaccttcagcaggtactattggacgtggttccgaaatgtggaatgtttatttccgtatagcagaggcttatctaattgcctctgaagctagctgggagctatcacgggataatactgatacagatgcactgaagtatattaatgccgttcgtaatcgggctggaatctcgtcattaaatacaattgatcatgagaaaatcatgcatgaataccgagtagaatttgcatttgaaggtaatcgatggtgggatctgaaacgctggatggaggcaagcaaaatatggactggtgaaccaacagcaagaacttcacaacgcttaggactatggccattcaaagtggttgcttcaggtgatcctaacgatggcaagtgggtatttattgaaaaagatatgcaaaagttagatttatggcgccgtccgttaaaatgtacagaagcacaatattattcagaaattgataacggctggattaataataatccaaagttagtgaagaatccttatcagtaacttaataagaaacaatgaagatgaaaacaacatttaaaatatattcaatagtcatattatccatttttgcattaataagctgcagcaaagataattatgacgaacctacctcctttataaaaggccgtgtggtctataaaggagaggctttacaattacgtggcaacgaagcagtcaaattgcagctataccaacgtggctatcaaaaacatgatcctgtagaggtttttgtaaaccaagatggagagttctctatctgtatctttgatggacaatatcaattaataacgaaggctggcaatggaccttggagtgatgagggacgcgatactatagagataaaattaaatggacttgccacacaagatgttgaagtaactccttattacttaatagaagatgctaaaatagctctgaatggtaataaagttgatgcttcatttaaagtaaataaaatagcaggtactggaattgatcgtatgattatgttattaagtaccacacaattcttgagtgatgctgaacataatgtagatcgttatgacgaaactgaaaatttagcacaatacgacgaaacaggtaagatatatagttttactaccaaagattatactaataacagtatgttccaaacagctttaaaaagaggaacattgtttggacgtatttgcctgtggcccaaagggtctgatcaaggaatttattcggaagtatttagacttaaatagaactatatttcagttttatttatgagggtgtcttcggacaccctcttatcatttattctaactcaaggagtaaacggaactgtgccagatggtttaggtaacggagtattcaccggtaaagggactcccaaatccggcattccatcagcatcccatcctatcttctgcaatcgtggattgcgactttccgactctcccgtattaccgctaggaacacttcttgcctgatacaatatataccattccgttccatcaggcgaaggaagaaaggaaaggttagccgggccatacactccatcttccggtctctgttgaaatacaggaacggggctcttcttccaggaagccggattcagcaagtcactatccgcgtcggcagtcaacattccggtacaataataaggagaccagcaaccgcttgccgcataatagacaatgacagtccggttatctttggaatgaaaatactgagggctttcatttacataaatcggataagcagtccgcccgccatccggatttacccactgccgttcccattcatactccggcttcgaaatcagaaccctttccgtagccaatgtccaggggttttccatgcgggcaatatagatgcattgtgtttcactgcctatcctccgattaggccacccggaccatagaagataaagctcccctttatgttcaaaagttgagggatgtattccccagttccaatcgggattggtcatgatcgctcctttcatgcgaaactctccctgcatagggtcaggagaatcattctcaatcacataaatctgatgattatctgtatttccatcatcggcagcaaaatagatataccatttaccattgatattccgtatttccggattccaaaggttatggctattcgaaggatctttaggcacccagacctctttacaagtagaatgagccatatcggtaatatcggtggttacccacagatatatttgctcattagtttcatgggtataataatatttaccattatggtaaatcgcgcttgaattagccccttccataaataatggattggcataagtatctttttcaacatcttctttttttcccgcccgtttggaattacaagagatgttcagcaaaacaaggaataataacaaacataaattgattctcatagtttcatttttaagatgatacaaagaaaagacttttttttcattaatagttaataaagcgaaaataaaaattaagtttggaatatcattctcgtcattacatcgtgacacatcctgctgatgacaggaaaacagaaaaaagagaatgtaaagacaaactacccattaataataaaaacagaaagtttcttggcatcattacacactttcacacgaaatatattaaccgtttatatacttcttccgaatcatttattaataaattcgttcatcgtttattataaacgtcccccaagtttattataaacccgagcatcgttatttcagcaacaaatattaattttaagcaacaaaaagggctgcaattcccataaagaatcgcagcccttagcttgtatcagactatccggcaagcattatccgaaatggaaacgcttgcaatctgttattatattgtacttattattactcatttttcgtctatattatcaatgttatcgaatttacttccggttctcacttacaaatatacaacataaaaaacggtttgtcaagccctgcatgcttctttcatacatctgatgacaaatcaaatggtagaatcagcatccggagtgctttctgccgctgtatcggaagcagacaactgattgacatattccttcgggagaactccatattgtgccttgaaacacttggcaaaataagaggaggaagtgaatccaacctgtgccgcaacctcggagatacgtgtaccgccctggattaactcagctgccttattcatacggagggccttcagataatcattgggcgacattcccgacaatgcttttatcttccgatagaagttggaacggctcatgttcatctgctctgcaagagtatcgatggagaaattctcgtctgccaactggtcggcaatcacttcctgtatcttggcaacaaactcacaatctctctgagtcatcgcaagttctgccgaggcctgattggcattcccggacaaactaaccatcagcttatggaaagactgcctcaaccggagcaggttctcgatctgcttatgcagttgtttgatagagaatggcttctcaatatacacatcggctccgcattccagtccttccaccttagattccagcgtcgtttttgccgtcagtaagatgaccggaatatgtgaatagtcgatttccgatttcactttgctacagagttccagcccgttcatttccggcatcatcacatcactgacgatgacgtctacactctcctgttcgagtatctcaagtgccgcacgaccattcggagctttcagcacacggaaccaggcaaccaacgagtcacgcgtcagattcaacagttcgacattatcttctaccagcaatacggtgaatttctttccggagaactctgaaggaatattctctgccgaaccttcgttttcggaatgaacctcaacgatatcagcagcttcttctgccttcttttcgcttaaaggaagagataatataaacgaggagccttgcggttcgttatcttcaaggcgcaggctgccttgatgggcttctgccagagatttcgcaaaagccagtccgataccggtacctgtggcggtagcgactttatcatccggcatttggtagaaggcttcaaatatctttcccttttgggcatccggtactccacgaccgtcatcactcacatatatctcatatcccgcatcagttgtcacgagtttcaaatcgatacgcgtacgggcatattttatcgcattgcccatcagattcaccagtatcttactcaacttttcccgatcgaccattgataccagttcctgctcgggcagagtcaataccagttcaattccctttaactcggcaggactggtgaactgactatatacatcattcactatttccttaatatcgcaacttaccagattcagttgcaaagctccgttttccatcttctggaagtcgagcagctgattggtaatccctaaaagatagtttacattcttatctattacagacagatacttagcttcttttccttcatgttctatctcttgcaacttttcaagaggcaatcggatcagactgagaggggtacgtatctcatgtaccagattaatgaagaagccgatctttgatttataaacttcctgttctttagcaatctgatatttctccatccgacgtttgtacttatgcttcacgcgaagattccagcgccatgcaatccagacaatccagcccatcaacaggagaatataaataaaataggcgaaagaactacgccaccaagggggagtaatcactacccgcagagtagtcgttttctcgttccactgatggtcattattggagccacgcacttcgaactcgtattctccgggaggcagattggtataagaagcagagttgttctcggagttggtaatccactctttatctactccttttaatatataggaatatctgtttcgtgccgggtcttcatagcttaacgccacaaaacgaatcgtgaaactattattttcataagacaaggttatcttgtcagccatataaatcggtttccccagttgaagcagcttcttcacttcctgttcgtcattcagataggataaacggatatcagtcacatataccggaggaatgtaggaattatccacaaaacgttccggctggaaaacattaaagccgttgattccgccaaaatatagtttaccttcagaagattttaaagaagaacgtgccataaactgatttccctgcaaaccatcattaatcgtaaactgtcggaaatgagctttagaaatcggattaatcttaaatatccctgcattgctggatatccagaaatctcctgtctgatcttgttcaatagaatagatcaccttattgggaagcgcagaatcaaactcaataaatgcctctgttttgggatcgaaggagcataatcctcccccattcgtgccaaaccacatcacgcctttgttatcttcaaataccgtgatcaccgaattactggtaatggtggtcgaatcttcccgttcgtgctggaaatgtttccagtgtccgctcagggtattgtaggagaacacgccgctgttggtcgttgcaatccacaggttgttatacatatcctcatatatatcgcccacggaaatcatggagccgatactggtaatcgtcatgaaattatcggcatcaggattataccggcataagccccagcttgttccaacgaagatttcccctttccggtctttatatatgcatagtacgtcattgctgcaaatggtattggggattccgcgcgagtgtgtatattcctttatcgaaccggtacgcagattaagcacacgtattccttccgcataagtaccgatccaaagacaatcgccgtctaacatcaaagagcgaatatcatatttctgactctttacaccaccgatatgatattccgaaagctcccgtgtaacggtattgaagaaatataagccactctgagtaccaatccagatatttccgtctttattttcacagaatgggcctaccacctctcctgctcccgctatccccgacagataggcgggtgaatagtaatcgaaacgcttggtctgcttggacatatagttgatacctcccaagttcgtcaatacccacagagcaccttccgcatcccacatcatgccgtttatggtctgatcactcagacttcgcggatcagccggattatctgcacggaggaaggttttcgactcgcggttgaatagatagagtccattatcggttcctaccagcagttcattctccgtatatttcagcaggctgcgaactgcaccgaagttcaatgaaggagccatgtaattctcaaccgttccggtctgccggttcaacctccccaacaaattgttgcctgctcccagccatacttctccctctacatccagtacacagtttattttgtaactatcggaagagttcacgtccgatgagaccttatatgattgcagaaatttgccgttttcatcgaaacaaagcagtccttcctgtagcgaagaaacatacaccttcttcttatcgtaactctgacaaacatcccagacaaaagaggtctgaatactattctgagtcaacacttcggtcttgggatcataaataaaaagtccctgccccaaggtggcaatccagagaagtccgttctccgtctttacaatcttcttgatttcactgctgacgtatacgccatactgagtggtcttgtcaaaataggagaaacggtccgttgcccggtcatagatatacagtccggagttcgttccaacccatatattctgatcttcttcaatcagtgcctcaacgaagttgttctccaatgagaatttatcgttcaatacattccgataaactttattgccccgaccgtcgtaacggttcagtccgtcactggtgcccagccagataaatccatagctatcctgtatagcacaccataccgtattatgtgacaagccatcttccacctgatatttcttgaaggagaaatagggagatgcagacaatggttcgagccagaaggccagtaaaagtatcagtatctttgttaacttcataccaagtgtgtcttatgtttagattaacgattcaaccagggttccggattcaacttttctttctctctgcgtaactggaaatgcagtaccgttcgtccgttatccgcgccatcagagaatatctgtccgatagactgctttgtgctcaccgtatcgccggatttcaccgaagcggaagacagattacagtaaacggaaatataattaccatgccggatgaggacgttaaatagtccgttcaactggaacacggctgctaccttaccatcaaagatggcacgggcttgtgctcccggctttccttgtatatcaattcctttattatccagcttcacattacggagtccttcaacggaatactgtccatagcggctggttatgatataaggtccggatataggcatcggaagtttcccacggttggcaacaaagctaccggacagttcacgatctgccttgctcatcgtaaaagcgtccaatggctccgacttcggtttggcagccgttccggtttcggaggcacctttgtcatttgtatccgccttcttgcgggctgccgcttcgcggcgggcttcttccgcggcacgtttgcgggcgcgttctatttcttctgcgatcaaccggtcgatacgggcattcagttgattggcttcccgtctcttcttgttcacttcgctttgcagacctttctgtttcttttgcagattagccaccagtgtgcgcttctctttctcctgagcttccagtttcgccttttcgttctcacgttctttcagcagtccctctttggcggctttcacttgctggcgttctgcttttttcttccgtatctgctcctgcttctttaatatttcctctccctgcagacgctggtaggtggcatattcacgcacataacgcatacgacgatacgtttgtcccaggttcttggcggagaagataaacatcagtttctcttcaatcgatttattcttatagaggtactggacagatgcttcgtacttcttctttttctctttcaggtctttttcaagactattcagctggcggttcaatgacactaattcgcgttcgatagtctccacatcgttattgatcgcaaggatataccgttttcgttcttcaatctgtcccgtcagtgccgccagtccgttcaactgactgcctacgtccttctttgtattctgtaaaatcgactccgtctcggcgatctgcttctgcaaagcaccgcgcttaccttccagctcacgaatcagcttgttcgattgagcagaaagcggaattgccagccaaaggctgcttaccagaattacaaagagacgttttatcataataaagctaccagcattttcattaattcttccaaagagacctgacggtatctggaagtaacttctgtcggagtgattgaaagttctttggtcgaaaaatcataaagttgtactttcgctttctccagtttggggattcccaggtctttcccggatagttcagtctttcctccgggtttagaagcgtcagtcagcaatttctccaattgggagaactctacgttcttcgataatatttctttcaattcatttttggttgcgcgtacaaaccgcttgttcatccggtcgacgaataatacttcagtaggagtcacctcgatgcgtgccaattccgtacggagaataggcatcagcaaggaaatctgtacccgttcacggctcttcatcttcatggtaccgcccactgacatacttccgcctttacccggaatcgtcagctgaagtctggaagccagatagctgggaatagctgcttcggaagcagtaacttccggcacctttgtcgccgtcagacgctttgaactcttacaacctaccaatacgactgcaatcaacaaaaaataagcgattcttttcattctgcaatgtattttttcttttctattttctgtttcaatgttttcgactcactgcccatttccagtgctttcttccagtaggtaagcgcgccgtccacatctccggtcatataatagatatctccgcaatgttctacaatcacgtcactcttatcgccgccctcacttttcatggcgttatcgatgtaaatgcgagcttctgcatagttccccttttcaaagagaatccaggcatacgtatccagataagtggcattgtttggctctgcctttacggtcttatagctcatttcttccgctttatccagatcacgacgctctactgacaggtaataggcatagttgttcaatgcgccaatgttggacggattgtagaccagcgccgagtcataggcagcataagcctccttcatctgcttctgcgtatgatacatatctcccagaatagagtagaaatccgagacgatttctttcttactgtcagccgtcgtatgttccagcgctctcttgcagatgcttatcacactatccggtttctccgcctgattataggcaacagccagataataataaaattccagcgcatccggagtcgcttcaatacccggctcgcagactttgataatctgcttataatcttctttttttaccgcagcaccgatcagcatcatacgggcagctttattggtagggtccaggtcaaccacctgttccaagacggggactgactccgactccatattcttggacaacagatattgcgcataaagcatcggaatctgaggatcatcctgttcctgcttcatgatccggtcaaacaaagcgatgatctgcgtactgtccttatcggcctgttcattttccacaatcatctgacgcatgacgcccactttggtatcaggagtcaccttcttattcagcaacagtgtatccaactgctgttggtagagttcttcctgccctgtctgtttatagtaagaagccatcgagaagatagccatcggattatcgggttccgccgccagcaccttctgataaacgtcataagcctcctgtttcttgccattctgaagatatacgtctcccaagatgacttgataacgcatgtccatcggatattcctgcaccagactttctatttcctgaaatgctttcttgtcatccttcatctggaggtagatacgaaacttctccatggacaactgttcattcttacccatacgcttttccagacggtttaaagtagagatgacttcatcatacttttcttgtcggccatacaggtccaaaaggttgaaaagcgggtcctgcttggcaggaaaacgtaccaccatctgttccagcagggtgacagccttatccagttcgttctgttgctgatacaaagatgccagtccctgactataccagtagttatccggcgcattcgccacagccttttccagcgcttcttgcccttgcggcacctgacgaaggaacatataatactgcgaaacctcataaagcgcagaagccgcattcggatgaatatccagacaatgctgcaataatccgaaagcggacgcataatccttcttttctttcaggcgcatagcttccagaaagaaataatcatatttccgctgctgttcgggcgttaatgaagactgcgccaaagcgacagctggcttttcccttgtacttttcaccgttccgcacgaaaccaatgtccatacagcaaccaaaagccatatactatttttcttgttcattttctctttttatggtacttatcctcgtcctgtatgtccgaagccccctgctccgcgttctgtttcatccagcacttccacttcctgccataccgcctgctcatgtcttgcgatcaccatctgggcgatacgttccccgtcctcgatcacaaaaggttcggaggaaaggttgaccagaataatgcagacttctccacgatagtccgcatcaatcgttcccggagagttgagcacggtaataccctttttaatggccagtccgctacggggacgaacctgagcttcaaatccttgtggaagagcaatatagattcctgtcggcaccaggcaacgctgcaatggcgccaatgtgataggttcagaaagattagcacggatatccattcctgcagataactcagtggcgtaagccggaagcggatgcttcgatttattgataacttgaacgttcataaatgcacatttactatttaacgggcgaaaatacacattttgaactgaaaattagttaagtttgcagttaaataatgtggtaacaaccattttgcaaactgtaatcagccaaatagtaaataaaatgatgaattggaagcaactaatatcagccaaacgcttcggaatggaagagtttcacgaagaacggcaagagaaccgttccgagttccaacgggactatgaccgcctcatattttccgcaccgttccgccgcctgcagaacaaaacacaggtattcccgctgcccggtagtattttcgtacacaaccgactgacgcacagcctcgaagtatcttgcgtaggacggtctttgggcaacgatgtagccaaagcaatcctggaacgccaaccggaactggaaagttccttcctgccggaaatcggctcaatcgtatcggccgcctgcctggcacatgacttaggcaatccgcctttcgggcattccggcgaacgggctatctctacgttcttttcagaaggaaaaggacaaaggctacaggaaaagcagccggacggagagcaactttctccgatggaatgggaagatttgacacatttcgaaggaaatgcgaacgctttccgcatcctcactcaccagttcgaaggacgccgcagaggaggattcgtcttaacgtattcaacgcttgcctccatcgtaaaatatcccttttcatcgagccttgcaggcaaaaaatccaagttcggcttctttgtcagtgaagaagaaagctaccgtaaaatcgcaaatgaactgggactcatccagcttagcgagcaaccgttaaagtacgcacgacacccgctagtgtatctggtagaagcagcagatgacatctgttatcagatgatggatatcgaagacgcccataaactaaagattatcactacagacgagaccaaagagctgttgatggcatttttctccgaagaccggcaatcccgtctccgaagtactttccaaatagtcaatgatatcaatgaacagatagcctatctgcgttcttctgttatcggtctgttagtccgcgagtgcacccgtgtctttctggaacacgagcaggaaatactggcaggaactttcgaaggagcgctcatcaagcacatcgccgaaggtccggcagccgcttacaatcattgtgcggaaatatcattgaaaagaatttatcgttcgcaagatgtactggacatcgagctggcaggcttccgcatcatcagcactttgctggaattgatggtagatgccgtcaccctaccgggaaaagaaaaggcttactccgagcttttaaccaaccgcgtttccgaccaatacaatataaaatcgcccatactctacgaaagaatacaggcggtacttgattatatatctggaatgaccgatgtcttcgcgctcgatctttaccggaaaattaatggcaacagccttcctgcggtgtaactaccttaggagtaaacaccccttcgctctcacaaggcattttcagcgcatccggatgactttctataaaggtctggatgtgccggattcgcttatcttcaaggatttcatctacagcaatcaggataccggtctcttctacatcaccaaactcatagttgatagccgtcccgaacatacgcatggtagggcttaaactcatataggcattgaccagcggcgggatattataacccagcttacgaatctccgtattcaatatcttataatcctctttaaaggtatccttgcagaacaatgttctcagttcctcgtcggaagtttccagaatcagcggttccatcggtgtaaccagctcttcccgatcattaaaatgcttcttaaggaagtacagaatcatgtcgcgtccacgacgatgatagctgggatacatggtcaccttgccaaagaagtacttcacattcggcatcaccactgtcagcgctcccaatccgtcccacagattatccaaagcgaagagccctttactgcctgcacgtgtagactgatattccagcgtcacaaaagagcgtcccaactcaatggtctgaggcagatattcctttataaacgcatccgagaaatgaaacatgtgagaagtagccagaatcggagccccagcttcgtcaaagcgcacatccgttccaagcaaataccggtaaccacctaatatttcttccgcctccggattccatacgatcaactgcttatatgggtgttccatcgtgtcgtattcgtcgatatccatcgacaggcccgttcctccacccgcagcacgaaaggcaatttctcttaaacgaccaatttcacgcatcacattaggtgcattctgatgggtaataatataaatctgattattacttttattggtcattcgcaagcgtctatcttccgtcaactctgctttcagcagttctttgctcaccggtttaataatctcttccatattcttgttatagtgttctatcagttacagtttatatacaatgtccttcacatactccgcccactgcgcaggagtcttcgatttatcgaaagtctgccagggaatcggttttccaaaagtgacagtaaaggttttgtggcggttcttaaacatctcgtccgccagatacagcatagcaatattgaatttaatacccagtgccttacaaacattcgccagattgtagaagaaatcagagtttctgccaccaaaatgaacgggaactacgtcccgcttcgcctgtatgctttttataatgaatgtcttcttccattccagatcacggatcactccgttctgacgccgcgagcaaagtcccgcaggaaacatgatcatctggtcgtcggactggaacccggcttccaccatcttgggaaagtcctttgcctgctttcctgtcttattgataggaacacaaagtggggccaaaccgcgaaggttcatcagcaggtcattcaccagatactttactttcccgtcataatggcgccccagcacatagcctagagccactccatcctgtcctcccagcgggtgattggacacaaaggtatacaatccttctttcggcaggttctctatacctttcacctccactttcgcatcaaggaactccatgcatgcttcaaggaaatccactcccagtttatctttcgattcattcaggaacacattaatctcgtcctgatgaactattttcttcagataagaaaccacaaacttagggatgtacttatattgcttcggagctttcgtccgaagtatcttatcgacatcgattaaaaataaagagtcatcagtcattcttttcaaataaaaatgatgccacaaaattaacggttcttttttattaatcgcaataatttgccagaaaatgcaggatttaagtttgcaacttgaaaaaagaacacccaaaaactatcaaataccacctaaaaactatccgcggatagtttttcccctaaattttgtcggttcataccctatctcattatcagaaatgccgtaaacttgcaccatcgaaaaatacaaacgaatattcactttttaaaagcaacgtatatgaaaagtttaagcttcagaaaagatttagtaggagtacaggatgagttactccgcttcgcatacaaactgacaaccgaccgcgaagaagcaaacgatttgttgcaggagacatcactcaaagcattagacaatgaggataaatatatgcccgacacaaatttcaaaggatggatgtataccatcatgcgcaatatctttatcaacaactaccgtaaagtagttcgcgaccagacattcatcgatcagaccgataatctttatcatctgaacctgccgcaagacaccggctttgaaagtacggaaagaacgtacgacctgaaagaaatgcatcgggtagtcaacgcgctcccgaaagaatatagagttccgttcgctatgcacgtttccggcttcaagtaccgcgaaatcgctgaaaagctgaacctcccgctgggcaccgtgaagagccgtatcttcttcacccgccagaaattgcaggaagaactgaaagactttcgctaaacctttaactatattatttatcaattccaagttagatatttttagtgcagatttttaattgtgttagtttaaggcagaagagttaccataccttctgccttttttactaatccctcctatatgacacccggatgtcgagcatactgacacccgggtgttgtacgtcctgacacccgggtgtcatacataccgagacccgggtgtcgtgcaaacctccctcgcaaagaaagaaagcctctctttcgataaaaaagattcttcctcaatacaaacaaaaaagcgccgcatctttccgttttcgcccactaataaagcatttcccaaaccgcatctttttcaagtaaataagcatttaacaatcggttgaaaacttatctaaaagatttttatggaaaattgtggggaattgtggggaatttcctacttttacgctctcttattataataaggtaaatgatacgttttttaggcaatattgaagtcagggcggacgccaaaggaagagtgttcatccccgctactttcaggaagcaactgcaagctgcttccgaagagagacttattatgcgtaaagacgtatttcaggactgcctgacactgtaccccgagagcgtgtggaacgaggagctgaatgaactccgaagcaggctgaacaaatggaatagcaaacaccagctcattttcagacagtttgtgagtgacgtcgaagtagttacgcccgacagcaacggacgcatactgatcccgaagcgttacttacagatttgtaatatccgtggagatatacgctttatcggtatcgacaacaagatagagatttgggccaaagaacgggcagaacaaccgttcatgtcccccgaagagttcggtgcagcattagaagagattatgaacgatgaaaatagacaagatggagaaagatgagttgacataccacgtacccgtactgctaaaggaaagcgttgacggaatgaatattcatccggacggaacgtatgtagacgttaccttcggaggagcagggcattcgcgcgagattctttcacgccttggagaaggcgggcgcctgctgggattcgatcaggacgaggatgccgaacggaatatcgtcaatgatccccacttcacctttgtacgcagcaacttccgctatttgcagaatttcctgcggtatcatgacatcgaacaggtggacgcaatcctcgccgacctcggcgtgtcctcccaccatttcgacgacagcgagcgtggcttctcattccgttttgacggagcgctggatatgcgcatgaacaaacgtgcaggactaactgccgccgacatcgtcaacacatacgaagaagaacggctcgcaaacatcttctatctgtacggtgaactgaagaacagccgcaaactggcatccgccatcgtaaaagccagaaacggacagtctatccggactatcggcgagtttctggaaatcatcaagccgcttttcggacgcgaacgggagaagaaagaactggcgaaagtatttcaggcactccgcattgaagtgaatcaggaaatggaagcactgaaagaaatgctggcagcagccaccgaagcgctcaaaccgggggggcgccttgtagtgatcacgtatcactcactggaagaccgcatggtgaagaatataatgaaaacaggaaacgtagaagggaaagcggaaaccgacttctttggaaacctgcaaactccgttccggttggtcaacaataaagtgattgtccccgatgaagcggagatagaaagaaatccacggtcgagaagtgccaaattacgaatcgcagagaagaaataatctcagatatggaagaagaagcagtaaacaaaaaagcagaagagggcaaaaagaaaaaacgcacctcattgaaaagtattctgggaggagatatcctcgccacagactttttccgccggcagacgaagctgttggtgctgattatggtattcatcatcttctacatccataaccgctatgcgagccagcaacaacagatcgagatcgaccggttgaaaaaagaattaatcgacattaaatacgatgcgttgacccgtagttcggagctgatggagaaaagccgtcagtcacgcatcgaagagtatatatcaaacaaggaaagtgatttgcagacctctaccaacccgccttaccttattaaataaggtgtaagtggagagtcttaaaagagaataagcactgtggcagtaaataagaaaaatataatgacccgttacttctttgtcattctgatcatggcactgataggagtagcaattgtcgtcaaggcaggcgtgaccatgtttgccgaacgacagtactggcaggatgtagccgatcgtttcgtaaaagaaaacgtgacggtgaaacctaaccgcggaaacattatttcttctgacggtaaactgatggcaagttcactgcctgaatacagaatctacatggactttatgtccggtgaaaaggacgaaaaaagaagaaagaaggatcaggcacgtcgggattccatcctcaaagccaatatggattcgatttgcatcggactgcataagatattccccgacaaaagtgcggcacaattcaaggcacaccttcaaaaaggacgtcaggccaaaagccgtaactacctgatctacccgaagcgtatctcttatatacaatataaagaggtgaaacgtctgcctgtcttctgtctgaaccgctataagggaggattcaaggagttggcatataatcagcgcaagaaacctttcggctcattggcagcccgtaccctgggagatgtatatgccgatacagcccaaggagcaaagaacggtatagaactcgcgttcgatacgattctgaaaggacgtgacgggctaactcaccgccaaaaggtgatgaacaaatacctgaacattgtcgatgtcgccccgatcgacggttgcgacctgatcaccaccatcgatgtaggtatgcaggatatttgcgaaaaagcattggtagacaagctgaaagaattgaacgccaccgtgggtgtagtcgtattgatggaagttgcaaccggagaagtaaaagccatcgtcaatatgacgcaaggcagagacggtgaatattatgaagtacgcaacaatgcaatcagcgatatgctcgaaccaggttctaccttcaagacagcctctatcatggtagctctggaagacggaaaaatcactccggactatatcgtagacaccggcaacggacaaaagccgatgcatggccgtgtcatgaaagaccacaactggcatcgaggcggatacggcaaactgactgttaccgagattttgggagtatcgtccaatgtcggaacttccagcatcatcgagaacttttacggaagcaacccgcagaagtttgtggacggactgaaacggatgagcatcgaccagccactccacctgcaaatatccggagaaggaaagccgaatattcgtggtccgaaagaacgctatttttcaaaaacgactttgccatggatgagcatcggctatgaaacgcaggttccaccgatcaatattctgacattctataatgcaatagccaataacggagtatccatacgtccgaagtttgtaaaagccgccgtcagagacggagaagtgataaaggaatatccgacggaaatcatcaatcccaagatctgttcggacaagacgctggcacaaatacgggaaatcctgcggaaagtggtaggtgaaggacttgccaaaccggcaggaagcaagcagttccatgtgtccggtaagaccggaacagcacaggtttcgcagggagtagccggctacaagacaggaagaaccaattatctcgtcagcttctgcggatacttcccatcggaagagccgaagtacagtatgattgtttcgatccagaaacccggtttgcccgcttcgggaggtttgatggcaggtagcgtattcagcaagatcgcagaaagagtgtatgccaaagacctgcgcttgccactcacaagtgccattgatacgaatacggtagtcatcccgaacgttaaggcaggagaaatgagggaaacgcaacgggtactggaagaactgaatataaagatacagggaaaaatcaccgattcgggaaaagaagtatggggaagcacccatcccgcccctcaggcggtagttcttgaaagccggggtatcatgcagaacttcgtgccaagcgtcgtaggcatgggagcgaaagatgctgtttatctattggaaagcaaaggattgaaagtcaatctggtgggagtcgggaaagtaaaaagccagtcgatagccaacggcagtgttgcaagaaaagggcagacgattacgcttacgttgcattaagaattaaattaagtaggacagatatgttattaaacgagttactgaaagcaatccagccggtgcaagtgaccggagattcaaggatagagatcaccggagtcaacattgactcccgtctggtagaagccggacagctgtttatggcgatgcgcggcacgcagaccgatggtcacgcctatatccccgctgccattcagaagggagcgactgccatcctctgcgaagatataccggaggaacccgtagcaggaatcacttatatccaagtgaaagacagcgaagatgcagtaggaaagattgcaacgacattctacggtaatccgacttcacaattcgaactggtcggtgtgacgggaacaaatggcaagacaaccatcgccaccttattatataatacattccgctacttcggatataaagtgggattaatctctactgtctgcaactatatcgacgatcagccgattccgacagaacataccacccccgaccctatcacgctcaaccgcttgttggggcaaatggcggacgaaggatgcaagtacgtctttatggaagtcagttcacattccatcgctcaaaaacgtatcagcggattaaagtttgcgggaggtatcttcacgaatctgacgcgcgatcatctggattatcacaaaacggtagagaactatctgaaggcaaagaaaaagttctttgacgatatgcctaaaaacgctttcagcctcaccaaccttgacgataagaacgggctggtgatgacacaaaatacacgttccaaggtctacacctattcattaagaagcctcagcgacttcaaaggccgggtcatagaatcccattttgaaggaatgctgctcgatttcaataatcatgagctggccgttcagtttatcggcaagttcaatgcatccaatctgttggcggtatttggagcagccgtattattgggcaaaaaagaggaagatgtacttcttgcgctcagtacgctccatccggtagccggacgtttcgatgccatccgttctccgaaaggggtaacggccatcgttgactatgcacatactccggacgcgttggtgaatgtattgaacgccattcatggagtactcgaaggcaaaggaaaagtgatcaccgtagtaggtgccggcggcaaccgcgataaggggaaacgccccatcatggcaaaggaagcagcgaaagccagtgaccgggtgattatcacatcggacaatccgcgttttgaagagccacaggagattatcaacgatatgcttgccggactggatgcggaagatatgaaaaaaacgctcagcatcgccgaccggaaagaagcgatccgcacggcttgcatgcttgcagaaaaaggagacgtgatactcgttgccggaaaagggcacgaaaactatcaggaaatcaaaggagtgaaacaccactttgacgacaaggaagttttgaaggaaatatttaattgacaacatattattatttgcaatagacagcatcttatcaagcgtggggcaacaatgagaaactgtaaattgcaggctataaattgtaaatagaaaagagatgttatactatctgtttgaatggctgcacaagcttaattttcccggagcgggaatgttcggttacacctcattccgtgctttgatggctgttatcctcgcattgcttatatcgagtatatggggagacaaattcatcaatctgcttaaaaagaagcaaatcacggaaacacagcgtgacgccaagaccgacccgttcggtgtcaacaaagtaggcgtaccaagcatgggaggtgtcatcatcattgtagccatccttataccttgcctgctattgggtaagctggataatatatacatgatattgatgctgatcaccactgtatggctgggatcactcggttttgccgacgactatatcaaaatattcaagaaagacaaggaaggcttgcacggtaagttcaaaatcatcggtcaggtgggtctggggctgattgtaggcttaaccctgtatctgagtccggatgtagttatccgcgagaacatcgaggttcatacaccgggacaggaaatggaagtgattcacggaaccaatgatttaaaatctacccaaaccactattcctttctttaaaagtaacaacttagattatgccgacctggtgggctttatgggcgaacatgcacagacagccggatggttcctgttcgtgatcattacgatcttcgttgtaaccgccgtttcgaacggggctaacctgaatgacggcatggacggtatggcagccggaaactccgccattatcggtgccacgctgggaatactggcgtacgtatcgtcacacatcgaatttgccagctatctgaatatcatgtacattccgggatcggaagaactggtaatctacatttgtgcctttatcggtgcattgatcggtttcttatggtacaacgcctatccggcacaagtattcatgggagacacaggcagcctgactatcggtggtatcattgccgtatttgccattatcatccacaaagaattgctgataccgattctctgcggtgtatttctggtagagaatctgtcagtcatactgcaacgcttctactataagataggtaagcggaagggagtaaaacagcggttgttcaaacgaactccgatacacgatcatttccgtacttcgatgagtctggtagaaccgggatgtacggtgaagttcacgaagcccgaccagctatttcacgaatcaaagattaccgtccgtttctggattgtaacgattgtactggcagcgataacgattattacattaaaaatacgatgagaacaaacagactgcccaatgcaggatatttgtaacattaatatagttgagagtattaacccgattattaactttaaaaagatgtgcgcagccgacgagcgaaaaagaaaagatgaaaaggaagagagaagagtctgcctgtcggacagcaaaagcacattattgtaaatgaaaagaattgtaattttaggagccggtgaaagcggcgctggtgcagccgtactcgccaaagtaaaaggatttgaaacatttgtttcggatatgtccgctatcaaggataagtataaggaacttctggacagccaccatattgcctgggaggaaggacatcataccgaagaactcattctgaatgccgatgaagtgattaaaagccccggtatcccgaatgacgccccgctgatcctgaaactgaaagcccaaggcacaccggttatctccgaaatcgagtttgccggacgctataccgatgcaaaaatgatctgcatcaccggttctaacggaaagacaacgactacttccctgatctaccacatctttaagagtgcagatctgaatgtaggactggccggaaatatcggcaagagtctggctttgcaagtagccgaagagcatcatgactattatatcatcgaactcagctctttccaactggacaatatgtataacttccgtgccaatatcgccgtactgatgaatatcactccggaccatttggaccgatacgaccattgtatgcagaactacatcgatgccaaattccgtattacgcagaaccagacaacggacgacgctttcatcttctggaacgatgacccgatcatcaaacaggaactggcaaagcacggtctgaaagctcatctgtatcctttcgcagccgtgaaggaagacggagccatcgcatacgtagaagaccacgaagtgaagataaccgagcccatcgccttcaacatggaacaggaggaactggcactgaccggacagcacaatctttacaactcgctggctgccggtatctcggcaaacctggcaggtatcactaaagaaaatatccgcaaggcgctctccgacttcaagggagtggaacatcgcctggagaaagtggcgcgcgtacgtggtatcgacttcatcaatgactcaaaagcgaccaatgtcaactcttgctggtatgccctgcaaagcatgaccaccaagacagtactgatactgggcggcaaagacaaaggcaacgactatacggaaatagaagacctggtacgtgaaaagtgctcggcactggtttatctgggactgcacaacgaaaagttgcacgactttttcgaccgtttcggactgcccgtagccgatgtgcagaccggaatgaaggatgcagtagaagcagcctacaaactggcaaagaaaggagaaaccgtattgttaagcccctgctgcgcctcattcgacctcttcaagagttacgaagaccgcggcgatcagtttaagaaatatgtaagagaattataaaatggatttattaaagagcatatttaaaggcgacaaggtaatctggattatcttcctctgtctctgcctcatctcgattatcgaggtgttttcggcagcatcgacgctgacgtacaaaagcggcgaccactggggaccgataacacagcattctatcatcctgatggtaggtgccgtagtagtggtatttctgcataacgtcccctacaaatggttccaggtattccccgtcttcctgtatccgatttccctcgttctactggcattcgtcacgctgatgggtatcattacaggcgaccgtgtcaatggggcagcccgctggatgacctttatgggactgcaattccagccttcggaactggcaaagatggctgtcatcattgccgtttcgttcatcctgtccaagagacaggatgaagaaggagccaaccccaatgcctttaaatacatcatgatccttaccggactggttctcgtactgattgctccggaaaacctgtcgacagccatgttgctgttcggcgtcgtattcatgatgatgttcatcggacgggtagcggcaaagaaactccttctgttggcaggaggacttgtgctgattgtcgcactcggcgtaggtacggtagttgccatccctgccaaaacgctacacaatacccccggacttcatcgtctggagacttggcagaaccgtatcaaaggcttttttgataaagacgaagtgcccgcagccaaattcgatatagacaaagacgcacagatcgcccatgcccgtattgccatcgctaccagtcacgtagtgggcaaaggaccgggaaactccatccagcgtgatttcctcagtcaggcattctccgactttatctttgcgattgtcatcgaagaaatgggattgataggaggtatatttgtcgtattcctctacctctgtctgctgatgcgggcgggacgcatcgcgcaaaagtgcgaacggacctttcccgccttccttgtcatgggtatcgctttgctgctggtatcgcaggcgatactgaatatgatggttgccgtgggactgttccccgtaacaggccagcccctgcctttggtcagcaagggaggtacaagtacactgatcaactgtgcttatatcggaatgatattaagcgtgagccgatataccgctcatttggaagaacagaaagcgcatgatgcacagattcagatgcagatagaagccgaaacagctacttcggaagcacaagccgccgccgaacccactgcacagattctgaatagcgatgccaagtttgaggatgaacatgatagcagtaaatgaagatgaacggatagaaaaaaggattattatggagaaagaacttagaattatcatcagcggtggaggcacaggaggacatatcttccctgccgtatctatcgccaacgctataatagagctgcgaccggacgcgaaaatcttatttgtgggagccgagggccgtatggagatgcagcgggttcccgatgcaggctataagattatcgggttaccgatagccggttttgaccgcaaacatttatggaaaaacgtatccgtactgatcaaactggcacgaagccagtggaaagcgcgcagcatcatcaaaaacttccgcccgcaagtagcggtaggcgtaggaggatacgccagcggaccgacactcaaaactgccggaatgatgggagtgccgactctgattcaggaacagaactcgtatgccggagtcaccaacaagttgctggcacaaaaagcaaaggctatttgtgttgcttatgatggaatggaaaagttctttcctgccgataagattataatgaccggaaatcccgttcgccagaatctgacgaaggatatgccggaaaaaggcgcggcactacgttcctttaatctgcagccggataagaagacaattctgattgtaggcggtagccttggcgcacgtaccattaacaatacgctgactgcagccttagctacaataaaagaaaacaacgatatacagttcatctggcagaccggaaaatattactatccgcaggtgacagaagccttacgggcagcaggagaacttccaaatctgtacgtgacggacttcatcaaggatatggcagccgcttacgcggcttccgacctagtgatttcacgtgcgggagccggttctatttcagagttttgtctgttgcacaagcctgtggttctggttccttcgcccaatgtggcagaagatcatcagaccaagaatgcactggcattggtagacaaacaagccgccatctatgtaaaagacagcgaagcggaagcaaagttgatggatgtagccctgagcacagtagctgacgaccggaaactgaaagaactaagtgagaatatagccaagttggctttgcccgactctgcacgaatcatcgcgcaggaagtaatcaagctggcagaagcagaaaactagttgaggtaatgcaaaaatcgcaactatcccaattaggattgactaaaaagtcagtagaatctccaatctcctccttccagaaggaggagaatgaaaatactaccgactttgggggtcatccccaattaaaggtagtaccgactctgattaaaacttgaaatgttacttggaacaagaattataaaaagaaacagtataaagaaatgaatattgaaacgatcaaatcagtctactttgtcggtgccggaggcatcggtatgagtgcgcttgtccgctatttcctttccaaaggaaaagtggtagccggatacgaccgcaccccgactccattgactgaaaacctcatcgccgaaggcgcacaaatacattacgaagaaaacgtacgactgattccggaagcctgcaaagacaaagaaagcactttagtcgtattgacccccgccgttccgcaggaacacgaagaattggtttatttccgcaacaacggattcgaaatacaaaaacgcgcgcaagtactgggaacgatcactcattccagcaaaggtctgtgtgtagccggcactcatggcaagacaaccacttctaccatgaccgcccacctattccaccaatcgcacatagaatgtaccgctttcctcggaggcatctccaagaattacggcaccaatctgctactctctcagaaaagcccttataccgtcatcgaagcagacgagttcgaccgctctttccattggctgtccccttatatgtctgtcatcactgccacagaccccgatcatctggacatctacggaacagaaaaggcatacctcgaaagcttcgaacattatacaacactgatccagccgggcggtgcactgattatccgcaaaggtatctcactgcaaccgaaagtacaagccggagtccgtgtctatacctattcgcgtgacgaaggagacttccacgccgagaatatccgcatcggaaacggtgaaatcttcatcgacttcgttgcccccgacacacgtatcaacgatatccaactgggagttccggtaagcatcaacatcgagaatggtgtagccgccatggcactcgcccacctcaacggagtgaccgacgaagagatcagacaaggaatgaacagcttccgcggtgtagaccgccggttcgatttcaagatcaagaatgaccaggtagtctttctgagcgactacgcccatcatccctctgaaatcaaacagagcgtgctgtctatccgcgaactctataaagacaagaagatcacagccatcttccagccgcacctgtacacccgtacccgcgacttctatcaggactttgccgatagcctgtcgctactggacgaagtcattctggtagacatctatccggcccgtgagacaccgatccccggtatcaccagcaagctgatatacgacaacctccgtccgggcatcgaaaaaagtatgtgcaaaaaggaagaaatactgaacattctgaaagataaaaacattgaagtattaataactctgggagccggagacatagacaattatgtccccgaaataaagaaagaactggaaaaaatgaagaacgaagagcgaagaacgaagaactaagaatttctacgctacatcatacagtcgcgcagccaattctcaattcttcattttcaattttcaattctcaattaaataaaaactatggtaaagagaatccttctatctatcgtcatgttgatgcttatcgcctacctcggcatagccatcaccgctttcaaccgcaagcctgccgaccagacctgccgtgacgtagaactggtcatcaaggataccacttatgccggcttcatcaccaaagaagaagtgaaaggcatcctccagcataaaggtatctaccctatcgggaaaaagatggagcgcatctctaccaagtcgctggaacgggaactgagcaagcatccgctgatcgacgaagcggaatgctacaagacacccagcggcaaagtctgcgtagaagtgacacaacgtataccgatattacgcatcatgagtgccaacggagagaattattaccttgataataaaggaaccgtcatgccgccggaagcaaaatgcgtcgcacatcgggcaattgtcaccggaaacgtagaaaagtcgtttgcaatgaaggatttatataagtttggtgtatttttgcaaaacaataagttctgggacgctcagatagaacaaatccatgtgttgcccgaccgcaacatcgaactggtacctcgtgtaggcgaccacctcgtctatctcggcaaacttgaaaactttgaaaacaaactggcacgcctgaaagaattctaccaaaaaggactcaatcaggtaggctggaacaaatattcacgcatcagtcttgaattcagcaaccagattatctgtacgaagagagagagtaataagtaacaggtaataggtgatgggatgaagctctcaaaatagaaagttgaaaataattaaattgtaaataaagagatggcaacaacagaatttatcgccgctattgaacttggttcatcgaagataaccggtgtggccggaagaaagaacagtgacggaagcatgcagatactggcatacgcccaggaagactcttcaacgtttatccgcaaaggagtgatcttcaatctggacaagacagcacaaagcctgacttctatcatcaacagactggaaggtgagttgaaaaactcaatcgccaaggtatacgtaggcattggcggacaatccctccgcacagtccgcaacgtagtaagtcgcgacctcgaagaagaagcgattatctcggaagagctggtaaacgctatcggcgatgagaacgtagcgattccggtagtcgatatggatatactggacgtagcgccgcaagaatacaaagtcggcaataatctgcaagccaacccggtgggactggtaggaagccacatcgaaggacgtttcctcaatatcgtcgcccgctcttccgtacggaagaatctggaacactgcttccagcaggcaaagatcgatattgccgaccaactgatcgcaccactggtaacagccaatgccgtgctgaccgagagcgaacgccgttcgggctgcgcactcatcgacttcggagctgataccaccactatttcggtttataaaaacaacattctccgcttcctgacagtgctgccgctgggaggaaacagcatcacccgcgacatcaccaccctgcaaatggaggaagaagaagcggaacgtctgaagaaaacttacggagacgccctatacgaagaagacgaaagcgaagagcccgccacctgcaagctcgaagatgaaagccgcacagtcgaactgggcaagctcaacaacatcatcgaggcacgtgccgaggaaatcatcgccaacgtatggaaccagattcaaatctccggctacgaagacaaactgctggccggcatcatcctcacaggtggagccgccaacctaaagaatctggaagaaatgcttcgcagacgctcgaagatagaaaagatgagaatggcgaaactgcctcgcaacaccgttcacgctcccagcaatatactgaagaaggacggttcgcagaacaccctgttcggacttctgttcgaaggcaaccagaactgctgcctgatagaaaccgctccccagataccggtcactcccgccactccccgaccggagccagaaattcacaagaccgtagatatgtttgaggacgatcaggaactgaaagagcaagcccgactggcacgcctcaagaaagaagaggaagagaaagaagcacgggcagccgccaaggaagctgaaagactccgcaagcagaaggagaaagaagagaaagaaagacgcaagagagaagccggtcccagttggattcaacgcaagatcgactccctgaccaaggaaatcttctctgacgacgatatgaaataaattcaaaattcaataatatggacgagatagtacaattcgatttcccgaccgactcaccgaaaatcatcaaagtgattggtgtaggtggcggtggcggtaacgctgtgaaccacatgtaccgggaaggcatacatgacgtaacgttcgttctctgcaacacggacaaccaggcattggccgagtcacccgttccggtgaaactgcaactgggccgtagcatcacacaaggacttggagccggcaaccgtcccgaacgggcacgcgacgccgccgaagaaagtattgacgatatcaaagaacagctgaacgacggcaccaagatggtattcatcactgccggaatgggaggaggaaccggaaccggagccgcccctgtcatcgcccgcattgcgaaggagatggatattctgacagtaggtattgtcaccattccatttattttcgaaggagaaaagaaaatcattcaggcactggacggcgtcgaacgtatcgcccagcacgtagatgccctgctggtcatcaacaacgagcgcctgcgcgaaatatatgccgaccttaccttcatgaatgctttcggcaaggccgatgatacgctttccatcgctgcaaagagtatcgccgagattatcaccatgcgtggtacggtgaatctggactttgccgatgtgaagaccatcctgaaagacggtggtgtagccatcatgagtaccggattcggagaaggcgagaaccgtgtcaccaaagctatcgatgatgccctccactctccgttgctgaacaacaacgacatcttcaacgctaaaaaggtgatgttgaacgtatccttctgtcccacgtccgaactgatgatggaagaaatgaacgagatacacgagttcatgagcaagttccgcgaaggtgtggaagtaatctggggtgtcgccgtagacaactctctggacaccaaagtaaagatcaccgtactcgccaccggatttggtgtagaagacgtgcccggtatggacacactgcacgaagcccgcagccaggaggaagaagaacgccagttgcagcttgaagaagagaaggagaagaataaagagcgtatccgcaaggcatacggtgaaagtgccggcatcggaaagaaaagcctgcgcagccgtcgccatatctatatcttcaataccgaagatttggacaacgacgacatcatcgccatgatagaggaatctcctacttacacgcgcgataaaacgaagctgttgaagatcaagacgaaagcggctcttgaagaggaagttgccatggaagaggctacggacaatgacggagtaatcactttctagatggttcttccccttgctattacaaattgtaaataattaaaatataaatatcatcatggatttatttgacaaagtcagcgaagacattaaaaacgcaatgaaggcaaaagataaagttgccttggagactttaagaaacataaagaaattcttcatcgaagctaaaacagctccgggagccaacgatacactgacagacgaagctgccttgaaaatcattcagaaactggtgaaacaaggtaaggactctgccgaaatctatatcggacagggacgccaggatctggctgacggagaactggcacaggttgccgtaatggaagcttatttgcccaaacaaatgactgctgaagaactggaagctgcattgaaggaaatcattgccgaaacaggtgctaccagcggaaaagatatgggtaaggtgatgggagttgcctccaagaagttggcaggactggcagaaggccgtgctatttctgcaaaagtaaaagagttgttgggataagcccccacacctcctccccagaaataaaaaaaactttttggtctcacggtctcattccattaagataagccgtagataatcagcaatataaagagtgagagatccttttcaaacaggtgtctctcactcttttcttcattcaaacagctatttttcacgtatctctcatccacttcaagggtatctctcattgtttttaaggcttcatatgttatgctgctacctatatccttctcttttgatacctacatctgcatgttttcttaccgatatcttcatcgttccacccgggtaggacgaactgtctactactgtgacacgatcagttcacctaagtgcgataatcatatcacccgggtagaacgatgaagatatcggtgagataatatgataataccaattgaaagactggagaatataggatcatttgcatctaaaagagcggtaaacaataacttcttgatttatgaaattacctatttgacatcaagttacaagaataaaaacataataaatggcattatataaattaaattcttacttttgtaacaataggaagataacattcctgctttgacgacaagcaaaacattctttttggatagtttctacaacgaactaaattacgacaaacagatgaaaagcagtacattgataactattctagctacattcttattagtagggtgcagcaaacaacaatccactttggacaaacaactggatgaggttgaaaaaatcatagaagtaaatcctgatagcgcatcaagcatactggaaaacatagcatctccggagcagctggatgataaaacctttgcacgttggtgtatgttatcgggcaaagtcactgacgaaatctttaatatcctattgccatcttatcaattcgagcgagctaacgcttggtattcatcctacggtaaacccaatgaacaagtacaaatcttaatttatttaggacgttcctatgcaaatgacggggattatgacaaagcaatgtctatatatactaatgcgttagagattggcgaaaagaataaactctataatttagttgggtatacatatagctatataggcgacttatatagagagaaagccatgcgaacagaagctatcaaaaaatacgaaatggctgccgacaatttcaaaaaagaaaataacactgatagctacgcttgtgctctaagagatatggggcgtgaatacgcatgcactgattcaatatcccgtgcccttgaaattctgcttatggcagattctataaccgaaacttcagaggataaagatgtaaaagcttcaatcgaaaacactctgggcaacatatatgtaatgcataacaaatacgataaagctaaaaagttcttctacaaagcgttggaaggaagagaaaaaatgcctaattacatggcattaattagcttatacatagcatctgactctttaaatcaagcaaaagaactcctgcaaaagattccacaagatgatcctacttatacttatagtattaaatatctatattaccagatatacaagtcagaaaaaaaatatgagcaagcactcacttatctggaagactatactaatatattagattccacggtatatagcaacatccagtctaagatactgaacatagaacataaatataatcacctgaaaatcagcaaagaaatagataatctaaaaatgaagcaacagaactacatcatagtttctgttatctgtattgcagctctgctgttaatagttataggatatttattatacagaaaacaagcaaaagagaaaatcttaaaacagcaaaaagaattagataagatgaagttaaacctatacacactttctcttgagcttgaaaagaaacgaagtttattaaatacattcaaagaaaaagacgaaaattatgatcagctgcaagaagacatcgttcgtttatctgccaattatagaaaactacaaaataaattacttatagattcacctctatacaaagaactaacaaaattggggaatcaaaacataccgggaaataataaatcgctcataacggaaaaacgatggaaagccattacaaatgaaataacaaccatatatcctgaactttataattatatatatagcttaggtccgaacttaccggaagaagattttcaatattgctgtttgtacctttttggattcgataccaatacagaagcaaaactattaaatattgcccccaattccgtaagtaaaaagcgttccagacttaaactgaaactcaatatcacattcccgactaattcttcattatatgaatatttgattaagaatatgcattaatatccatattttatagagatattaccgatgtcatgttcacagtacatatctaaatcgtaagtgactgattatcagccaccgcctgtccatatcaaaactagtagttctcatacttagtccctcatattttaataactttgcagaaaacatttaaagatatgagaaagctaagtattacattattattaattgccctttcattcataacgatggaagccaatattttatcaacacacaaaagcaaaattttagtttttaaaggatggagtgaacgccagaagtcagttgtttttatacccatagaagcagttctcgaaggtcataacatcgaagtgcagttttttgaaaaaccgaacgagccagtcacgtttcaggttaaagacaagaatggaaacattgtgtttcaagatatgacaactcctgataacctggaaatctatcaaatagatgtgagtggcttcaagacggggcaatatgaacttctctatatagaaaaagatgtgactctcattggagagtttgaaatcgagtagacatcaacacatataaagacgattcatttgtcctgtcataacgccaatattaatcctataaaaataatatttatgaaaaacatttctagatttttagtagcattgtgttgcagcgcactatttttattctcatgtgagaatgaaattgaaagtgagattcaatcctcgtcagaagaattagttacatccgcagagacaaaggcactgtcagttgatagtcttgaaccacttaaaatgacagacgagttaaaagcattaaaagaaagaatggatgaactaaagaaaacaaagactagagcggcttccagtaattacggccaatatttttctgagaacatgtgggctattcgggaaatgccttttacattgagagcaacaagcggaggttatcttacagctagtggcagaggagggaaagtagatgtagatggccgtagagcagatatttacaaacaattttatgttacaatccccccgtcaattgtaggagttccctatttaatttattcatgccaatctgaaacacctctggctgtaggtcactatacaagtaatccaaaccagaaagtcgtattagccatgactactaactccccgaatgagttttctgcttcttgggatattatacccgcaagcaataatccgggagggtacgttattcaaagtgaatcgtatatcggacaaggaagtggcggttggtgggatgtttttaactatgtggttgaagtacaaggaagcaatctgggttatagtcaatactcacaaaaggcagaacaagagttcaccatcactcccaatgctccattcactctaaagaaactcgaatttattaatccatattctgctaccgtaattcaaagagaaaatatttctatccaacaagcaaccacaaatgtttcatttcaagaaaagcgggataatctgaagttcattaaagaaatgaaagacaattcttattttgaagaagagaaaggtattgcatttcaagtcccggcatcggacctagaatttgcactccccaccgtaacattaggagaaatagaccttgtacctaataataaagttcccgttgatacgaaatatgagcccggcatccgcagaacagtactgagaacactatataaggaaattcctgtagcagtcaaaccgcgtacaaagctcacactgacatattattttaaagcttatgatgtatcagtagattatgtcgctactatcgaatattttaatgaaaaagataaagagattagagaagctaaactacccggacgttggagcggaagaatatatgttgatgaaatagccgaaccggattatgaagaagtaaacttagatactcaacgaagtgcaaaaggaaaagctaacatcaaaaacgttactcaatcatcaccactcactttttaaattatacgcaaaatgaagaagttatttatatccctatgtataatattgttcacaatatcatgcactaatgaggaggaaactaataattatactccggtagataatcaaagcaattccacatcagaaatcatcttgcaagaacgtaactctagtttacctagagtgtggtcgaaaaaaacagcccaaagagtcacgacaagagcatccttcaccgatgctacagacttccttggatgctcttatgcagtagaaaatggaacttctattatcggtgatttcgctaacgccaaatacccggttgtcaacatgaagaagttactcgaaaggtacccttcatacatcaatcccaaagaactaagaacaacagagacaaaggctttatcttattctgatttcgatcgtttagagaagaataaaactttcactaaaacagtaaagtccggtttttctctaaatcttggaccattcaaatttggaagacaaaaaactatcaaagagacctttgtccataatacagatgatagtgagaaggtagtccatggagaactcagtatagaggtagtcaatggaatgttaaacttgcaaacagcacctagtgcattgagaaaaattgcagctgattatttagatgaattattcgtagatgcattatataattcatctatggtggaattaatgcaaagttatggagaatttgtcctaactggctactatacaggaggacgggcttcagcacttttttacggagttgacacaaatagtatacaattcgacagcaaagagaaagatatggatgtagcgataaatgcatcctatgaatggaaaaataaaaagccaacagctccaagcgacacaattcattctgcttcaggaaacttatccattggaacaaagagagaaaactcagaaacaataaccaacaaattctccgcattatcatattccatcaaaactcttggtggagcgtatggttacagcatttcaactcccccctatgatattacgaactattctattgatttaaccccttggctgcaatcgttaaacgatcccaaaacacatactatgattgatctgcaagatggtggactatatcccatatccgattttattttggaagagaattttaaacaaagatataatgatactcacatggactttcaatatcaagagagtcttgaagaaccatatatagagattataaagatgtatattcgcaaaagcaattcgggagaaaaattatatgatattgttcctgtgctcaatacaagacaaggagataagcttatattctcgaacccagatgctgctagtcaatccgatgaagaattaaaagctaacagcattcccgcaacatttcttaccaaaagtaatgcaataaaagatgagaaaagtaaatactaccaattaaaaattaaagcagatcccaataagactataaatccaattatacagactactctttcattccagataaacaatgtggatgagaaaggtatgtacaagttcaaaaatgccaacactaatatttggtacatatataatccaacatctatgtattgctttgcatactatgatgatgactatattcctgatgcatatggaatattagattgggtaaacggcatccccattaaggcagttactatgacaactctgtatcagagatacaaaatatatggtttgtagtaacaataaacagaattaatgttcctaataaacatagatttattaggaacattaataataaaacattatctttattcagacttaacaaataactattatgaatacaatcaaaacgcttctattattatcatttagcatcctattatttaactgtagtgatgaagaagataagaaaactgaaaaagagtttatctttagcgcaagtgaattaaaacaaactgaatgggaaggagaattcctttacctaacaaatggagaaattgactcaaaaggatcgataaaaatcgttttttatacagaaaaaaaaggtgtttgtgagtataaatttgattatcatattgatcctgagacaataagttttgaatatgaaatcagtgacaaatttatgtacattgatggtcctcttcctattcatggaaattggatacaacaaaaatacaacggaaattctctagaaattgctgatagcaaagcggcttttaccaattctcgcatgataaaattaacgagagtcaactagtaaaacctttttctactaacaattaccattccaaggaaatagcctgaaaataggagtcttacatctgtctaatagcagatgcattattcctttttattactatcaaaatcttcttattaataaaattcaccaaagtatcaaccataagaaacatgaaacaatctaatatctccgcaacaataataatgtcaataatatcatttgcatcctgcacaaatgatattgagaatctcgacattattccgacaaataatggacaaaatacagaaggcaacattatactacaagaaagaaatccaaatcttcccttacccttaataaagaagttcatattaaacaagccacaaaccagaaatagcgtttcaggcgaagacagaaccttccttggatacagttataaaataaaaaatggggattatatacaaggaagcataaatagtttaggctttccaataatagacattgactctataagaaaatatagaccttcttatctacaagagaaacttataactgtaacagagactaatattttcacttataataatctcgacaaatacttgtatgattcaagatttggcaaaaaggtatcatctgagtttactttcaatcctaaagttttcgcaacagaaaaaaaggaagcaatcacaaagttattcggtaatatagaaaaagctacttatggtaaactcgaagtttcttttctaaaagggcaatccacattaaatcatttaccaagttcaagactatggtatataagccaatttcagaatcatattttcacaaatatcctatataatgccccaatggcatccatacttaacgaatttggtgaattcatattaacagattattttacaggaggaaaggtttatgccttattcgcaagcaaagccaaagaagggacaaccgctcaacaaaaagaagatgacatgtatacttctataaacacttcagtaattaacctcaataacgctactagtattaatttaggtttcaacggttccaactttgacgcaacaaaaacctttaaaagtacagatacttatttagatatgaaaacatttggaggggaagtaagtcaaagcgtagcaataaatacaaaagtttctaatatcaatatagacttaacaccgtggagatattctttaaaagacatggctaacaatacaatgatagatatagcagacaatagcctgtatcctctatcagcctttgtactcgagcaaaatttcaaacaacgccttgatgacaccttcaacgagatactacctgcgaacaaagagctagtacctccacgcattgaaatcgtgagagttctcgcccgtacaacaccttccaatgaagctctttatgatgtagcagccgttttagttacaaggcaaacagatagaataatattgagtgacgctatggcgtcatccgctacagatgaagaattaagaaaaaatgagaacaatgaagttttcatgcagaaagtagaaaaaatagcaactgaaaaatctaagttttttagttctgacatagaaatatcatataataaagagactaaactgaatcctactttaaaatcaccattatgcatagaactaacaggatttaatgaaagaaacttttatagattttattatgaaaagactaatattgaatatatttacgatcctgctactcatctttgcttatcatattacataaataaaggggacgatagaatcttagatatctatggcattagaaactggatagaatcactacctgaaaagaaaatatcaataacaacattagcaaattcatataaaatcattggattatagacattgaggataatcgctaaaacacgaaatcaagtagacatcaactcatataaagacaataattcatttgtcctgttagagttgaaaacagatgcttatgtatgtaagaatcatgttaatatataaactatttttgtaaattgaaaacttaattagatatgaaatataatataaaacagtcctctttattgatgctcttcgctttgtttttagtagctttttgctttatagcttgtgatgatcaggacaatgaagagcaggaacaggtggggcaactcactcccgaagctctctatcaaacttcatggcgtggcaccggacattgtgccgcatggagtttgaaagatagaggtatcggtatacaattcgtagatacccaaaaaggaaaagtggtttgggaagattatgatgaatttgatattacctacatgatagaagggagctatattacatttaatgatattgcgtttcaacttgccggggctccttgggtaattaaaagttataccaaaaatcacataactcttatacaaaatgaagctagtcctgataaagataaaatagctacaatagagttggatagggtagactaattctttaaaagatatagtttgaggttataaattcctctttcaagttgtattgataatggaatgcatttaacaattagtaaagtgctatattataactagaagaaagagtgtatcaaaggccagatagaagtatcattctatcattcagagcgtagtgaagaatcttttctttgatataaataaagagtagatccttcggcaagcttaggatgacagagcaaaatgatagcagtcttcaataaattattaagtagagtctgctgaattacaaatacctgctgcttgttaaaatcaaattttagcgagcgcaggtattgaaattcaaagattaattgattagagtctcaatttaacaagaaattgagcatttcaaacaaggtatgcagaagttcttaaggggacctaaaggctaggccatctatttagattaaaaataaacaaggacataaaaagtaaataaatgaaaaatagttatgtctataatatttttatcatacttttgtacaaactacaatacacaacattatggcaaatagactgaccatggatataataacaaaaataatttcggagaagaaacttttttggataagtttcgctataatcggttatttttgtttattatatctaaatgcctatttcgcaaaatctgacttagttttcagtaagcccccgataaagtacccgtataaaaaagaatcgctatagcaaatcgaacaaagctatagtgattctgtatttatattcttgtttttcgttagagtattattagagttctttggagtttcccgattcccagcaatggggtagcagctcttttaggtctttctccttgttggctgcataatacggcaatagtgcaatcacctccgtgagccattcccgggggttaatgttggaggctttgcatgatgccaagagcgaacagattatggcagtgttctgcgcggcttcatggtttccacaaaataagaagttttttcttgataaggctatcggacgaatcgcattttcggccagattattatctattttaagcctgccgtctttcagataattcctcatacgtggccaaagttgatacgcgtaagcgatagcttgccccatccggcttttaggaagcactttcggataggctgtttccatccatttttccagttgctcaagtatgggaagtgcctgttcctgtcttctaagcatgcgttgctcataagtgagttcctcctggtcggcaatctgttcgatccgatagagttgctgtatttgagccagaacatatccggccagggattcattctcttctttggcaacctcgtaatgtcgccttatgtgggcaaggcatccgacaaggcacacctctttcttaccctcaaagatgttgtaggccgcatagccgtcactttgaagatatcctttgaaggtttgtaataatttccaggctgtttcctgtgagcgggaaccgtcatcataatgaaagaagaccaatccatccataaccgccctgactatccacaagtattccttaaccgctttatgattctgtttgttgataaccggtaatgtcgtttcgtccacctggatatagtcggccttcaatacctgtttcttcaactcttcatagagaggtttaagtaattcacaggcaggtttgaaccacccctgaagcgtgttttccgagatcttcaggcctaaatggtgaaactcacgcacctgacgatagaatggtacatgatattcatatttttgcaagaggatttcagtgagcaggctggcaccgggaagtcccttgtagataggcaatagcggaagaggggctataataacactgccctgatgcccctgaggcaaacttatattgtctttcaggccatacttgggacgtatgatctcttttacgtataatttgcccggttcaaattcaagtgtacgtgtgcgttcctcgcctatgcgcttgtatttatccggatcgactccttcgggttctatgacaatctccactacaggaaggccatccaacatgttgcggttctgacgcactttctttttgggagtcgtcgagcagacaggttcttgggctgcggcttcttccggtatttcgtgttccaacggctgaacaggtggatcgaacagtgatagctggttcggatccagatgggctaatttctcgctcttacggccgaataactgacgatttaaccaggctacctgagccagcagttcctgaagcttattttgcagctgttcgttctgccgggtcagacgctcgattgactcagactgggagctattagcctgctggagtgtggccaccaaaagttctaatgtttctgtctgagtcattcgtcatacctgttttgaacaatacaaaaatacagaaaagcaaccgtataatcaaggtttcacctgctgtttttcagtactgcatgtcactttttcgtaacgctttcagacgtttgagccttttggaaggttcgtcgttgattccctctaccatcagaaccaggtcacgccactgcatagggtacgacttgctttctttgtcataagagggaaggcggaaagtgccttcttcaagtcgttttatgtacaaaaccagtccgccatcttccgcgtgtagcagtttcattgtagtgcgctggcggttgataaagataaacacatcacctaaacggacatcatatcccattttatcatgaacaaccccgcataatgagttcatacctttacgcatatctgtcttacccggacagagaaagtagcgcatcgtgtcattcaggcaaaacatggcgattgcagagttgagtgagcaattgcatggccgcctgggattcagccataccactgaagtgggcgataataccaccggggaactctatccggatctcacccgtttgtatagcgccactatcacaggcagagtgggaagcaggtgaagaggtgaggctaaccggtgcaaactcctctaaagaggaagaatgcctatccatatgataacgcctcgataggccaaactttcctttccaatagtaaaagcttgattcggtataggcttcatttatacagaagtcttttatcgtcaaaccgctacgctgttgacgagacaggatttcaatgaattcttctttactcattttttgcatagtcttttttctggcaaagatcgagacttaaagatacaaagacaacgggtactttatcaggggcttacagttttcatagggtggattcaagaactactaacgataccatttatactttttcagtttatacttttgatcatatcgattttgtactgtattaaagatacatttcgagtaaatagatattcgtttgggagtttcttcattttattgactaataatctatttgttatctgtagtctaatcttcagataaatatagttcaaaagcgaagtgtttcttgaaaactacagcccctttcaccgcttatcgtgaaatctatatccaatccccaacattaaattgttagggtctttaaacttactcaactgataccccacgtgcaaaaacaaatggcgggtaacataagttttgagagccaatatttgatagaaaccttccgtatcatcgccactatatatcatatttcgtccgataccgacattaatggagaaaataggcatcaccagttctgcccgaagagacaaccccaccgcaaattgttcgcggaatggaggacggtgaaactttatatcatccccataagttcctactagcttatagtccttaatattagcactctcgtcaaattgcgcatccacagaaagtcctgcccggaaatagttattgaaattatacatcggggcaaaattgagacctacaataccgaacgaaccgggaaccaaagtggggataccttctttaacgaatcctcttttgcgagtggcaccgtataccaacaagtcatagctgacgtgtggctttatgtaaagacgtttgggagcaattgctccggacgccttatcttcggcattaaaggtacgtacaatgccgactctccctccgatagtattgagacctccattgggataacgcgtatttccattggagaaatgagtgaagtctacccctgctgctagtttccactgtggataaaactgccagttcaagacaaagcccaaattgatatacgcattgattttagaaccgatagcgtcattgtaccaattgctatgttcatcatattgtttccaaccgaaagaagcaccgaaattccactcataatccaacgacaaacaggatgaaagtcgtacaataggcgccccttgaaaagcatataccgccactggatttcccagttcagcggaattataaaatgtattatgcgaaacaccgatgccctgataggcatgaggatacaacctccccaaataggaatctttgctgaactggaaagcatacttcaagtgcagggaaagtgaccgatcaattttctgccgttgtgcattatcgccttcaaggaaactgtttgtcggagctacatagcccggacgaacgtcaaaaccgatctgatggatgagggcatggttggtgctgtcattcgcttgtcggacagatttcactactgtctgagcgtccaatttgttgccgactgctgaaagcagcagcaagcagattatatacagagaccgtctggtattcatatttctactcatttgatattctcgcgtgctatgtaacattttccgggcattttactttgcaacgtaccggttatagtgcgctgtctcccattcttagggtgaacagcataaagggtgtactccgtttcgaaccactcacattctaacagcacgatgatacgttgggtagttttaggcgggatagaaatctccttcttctccgtatcagggaaaggcaaaggcagcgcttgctgctcagacgtatattgcgcctgtacaccgttcattcccaaccattcgttttccatgcttggtatctctactgtcggattatctcctcccaatagtcggaaagcctcagggtcatcgcttttgaacaccacttcatggtgggcgtccttgtaagggaataacaggcatggggagggagtacctaaattattagattgtataaaactcatagtttcttccagtctccattcatgagaatacccatttaaagaataagtgatatgatcgaacacatatctgtccgacggagtaatttgaacatatatttcttgtgattcatactcattgctcactacaagcatgaatctaaagtagtcgttacggacgttttcgcccaccgttatctttagctctttggggttactgcgttgaatgatgaaatcggtcagcttttcattgcacacaatcttacctaatcctttcaggtagacatcctggtttctcattatcagattgtcgtcggcatcataaacttcatattgatgggtaaagtcactatcgtaagtatacatccaaaccaaatcccaattggaggatgcaaaacgaatagttacctcatcaccattcccgtccaaagtaaattcggtatcggaagtccggaagtcgtcgacgaatacatcatcgttacaactataaagtcctaatagaataagaatatatgctgttaagtttacgattgttttcatgtcggtcgttatctagttattttgttgacgacaaaagtaatacatatttttagaagagagttattatcacccctgtttagttgccacataaaggaaaataaactatttttgttctcaacattaaagagggagcaattatggatgcagcaataaagaaaataccttatgggatgacggacttcgagagaataattcttgaaaactattactatgtagacaaaacacaatatatcgccaaagtagaaaaagtgacctccttcttcttctttgtccgtcctcgacgtttcggaaaaagccttttcctaaacatgctcggtttatactacgacatcaaccaaaaagataaattcgagaaaatctttggtaatctttatataggcaagcatcctacgcctgatcgcaacaaatatctggtgcttacactcaatttcagtagtgtagccgccaatatggatcgtttggaaaaaacattcaacacctattgcaaaatcgtaatggatggatttgcagaacgaaacgctcatctgttagggaaagaagccgttgaaaagctacatgaattaaaaacaggagatgccttattgggatcactgtgccaaagcgcccaaaacaagggacaaaagatatatcttatccttgatgagtacgataactttgccaacaatattctggtagattatggtaataaacgttatcgcagcatcactcatggcagcggattcttccgtagtttccttaaagtggtaaaagactattcaagttcagtgatcgagcgcatcttccttacaggcgtaagccccgtaacaatggacgatctcactagcggattcaacattgcggataattatagcagttcacctatctttaataatatgatgggatttaatgaacaagaagtacgcactctgatcgattattacaaaagttaccgggaactaccgcacactacagatgaactaataaccatcatgaaaccatggtacgacaattactgtttcgccatgaaagcgctaaaggaaccgtctatgtacaattcagatatggtgctctatttcatgaatcattatatgctgaatgaagacatccctgacaatatgctcgatgctaatattcgcaccgactacaacaagctgcgccacctcatccacgtagacaaaactttcggtgaaaatgcaagcgttgtacaagagattgttgaaaaaggttctactaccggaatcattgcaaacagtttcccagccgaagacattatcaaaccggaaaactttaaaagcctactctactattacggcatgctaaccatcagcggaatggaaatgggtgagcccatactgagcgtccccaactgggcagtgcgcgaacaactttacggttacatggcagacatctacaaagattccgccgacctatatctggagacagataagctggtggaccgaatgaaacgaatggcatacaaaggagaatgggaaaattgcttcacatacattgccgaccgcttgaatgcccaaagcagtgttcgcgacttcatagaaggtgaagcttatgtaaaaacctttattttggcttacctcggattgacacattattatattgcccgtcccgaatatgaaagcaacaaaggatatgcggatatctttctgcaacctcgcctgctgcaacttcccgacatggtatacagctactgtatcgaagtgaaatatgcaaaacgggatgcttctgacaccgagatagaaaaattgctgtccaatgcaaaaatacaactgaaacagtatgcagcaagcgaatggattcatcaagacaaaaggactacagaattaaagagtatcgcattagtgttccaaggctggaaactggtgagagtggaagaagtataaacagctaatcaaacaattctttcagtacatccagcgactttaatgcaggaaaatctggcagatgcaaacgataataatcattcataatcgtcaggcagcgagtgcgttccgcacggctcatgccaaataagtgcatcgtctcataattcatgcgcatcaactggcgaagacgtccagcctcttcgggattaatataagaagaatgcaactgcggacgagtggaagtgaaacaagcattcagcaagtcaaagtaatcaccggtgtgataatcttccagattcggatacaaccccaaaaaacgggaaagacgcatcagaaaaaccagatggaaattggcaaacccttcgcgacattcgtccagccaaatgacagaatgctgcaaataagcgaacaacggacgattctcagcctcttcacggatagcacgatacagaaactctgccagaaaaagtgccattgaagacttgtacgggtcataaggaatggaggtaaaaggataaaaagacttcgcctcttttacccgatagagagtggcattcggacgataatccgcctcaaattcaatgaaagacaaaggctggaagagcactgacttgactgccgccttccgcgaacggggtacgggaacgagaaaagaagtccgcccggataactccgtgtacatatctacaatgatagaagtatcattatatttaagcgtatgtagaactattcctttcgtcttttgcagcataatgcactcctctttttatcattccggaacaaaactacaaaaaaatgtctggcaatcgggagctttttagaggcgttaacaacaaaaaagattgctatttttgttatactccctgaagaacaagtaaatatagacaagagtatgaaaagaaaaagtaataaaaacagctttaccggatgcgcaaaagcatacatccggaatctacaagaagagggtcgttactcgacggcacatgtatacaaaaatgcaatcctgtcatttgccaagttttgtgatactcccgaagtcgcattcggacaagtcaaccgcgatagtctgcgacggtacgggcagtatctttatgactgcggattgaaaccgaacaccgtatcgacttatatgcgtatgctgcgcagtatctacaaccgcggtgtcgaagcgggtacggcccgtttcatcccccgactgtttcgtgacgtattcaccggagtagatgtccggcagaaaaaggcactgcccatcaacgaactgcacaggttgctctacaaagtccccaagtccagccacctgcgtcgcacacaagcgatagcacgactgatgtttcagctctgcggcatgccgtttgccgacttcgcacatctggagaaatcggcactggtacatggagtactgagatataaccgtataaagaccggtactcccatgagcgtcgaaatactggaggctgccaagaaggcaatcaacggattgcgcaataatgaatcttccggagaggattgtccggactacctgttcgacatcatgaaaggagataaaaaacggaaagaagaggcaggatataaagaatatcaatcggctctcagacgattcaacaatcaattgaagagtctttccagagagttacacatcaaatcgcctgtcacctcatacaccatccggcattcctgggcaacgagcgccaaatatcagggaatccccatcgaaatgatcagcgaatcattgggacataaatcaataaagaccacgcaaacttacctgaaaggctttggactggaaaaacggacagaagcgaataaattgaattgtttttacgtagagaactacgttacgagcaaacaccaagagacaatatattgaatataaacaaattaccttatctattacttcttaggtaacggaaataaatacagcgcaaagatatagaaaaagaacatcacattccaaattaattatacattatttcacttcctttctttcaaaaaaataaaaaagaatacaggagcatgaattatatctgtttcatgttccagaccgctattgtgtctgccggactatttttcagccggaaacctataaatacgctttagcactcaaagaccgccgccttttttacttctttcccctccacataccggtcataagaccggatttccgttacctaagaagtaacagaaacacataaacaaaagattatgacacacaaacccgataggaatagaaaaaggatatctacagccgccagcataaagggactcacggcagtcttgaaatgtatgttggcaagtatcttccttacctgtcttttgcccgcctccagtctatacgggcagaagatagccgtcaagagtaatctgctctatgacctcacaaccactttcaatatagggggagagataaggtgcgatgatacgcacacgcttaatctctctgtcaactacaatccctggaacttcgggggaaacaaaaagatgaagcatttcatgctccaaccggagtaccgcaaatggtttgacagagtgttcatgggaagctacatcggctttcaacttcactatgctctattcaacttcggcggaatgctcccttggggattcggaaatggtaaaatgctgggtatcgaaaacaggcagattgccaacaaccggtatcaaggcaatctggcgggcttcggcatctcctatggttatcaatggatgatcagtccgcaatggaatctggaagcgggactttcactgggatatgcccacctcaactacaaacgctatggacagcccgaaggcgctgcctttatcgaaaaatcccactgcaactactggggccccacgcagatagggatatcactcgtgtatttcattcagtaaatcaattaaatcacaacataacatgaaaacgaaagcattcatctttttcagtttattgatatgcaacttgctaccggcacagaacgttaagctggatatcgtaccccacttcttcggcgtccgtgcagattcactgtttctgtccatggatatttcagtccatataaaagacatggattccaagagtgcctttatactgacacccgtgctgaccagccaggagaaaagagtatcactgccgcacatacaactgaatggtaagcagaaacagaaactatatctacgcaatcagattttacgcaagaagaatgaccggaaagaagaggatgcgaaagcttatctgattgccggcattgacgaggaccactcccgtaccatttcctaccggacttcattgccgacagaggattggatgaataatgcaacactgatacttaaaagaactattgtccgtccggaaggtgaacaatctctgaaagatacaatcgtcataactcctcaaaacatagcagcatcttccggcgcaatagttccttccggtacagctacacaagaggtcgttcctctttctgttgtcaatgaacgccctacgagtccggcagtcggcagcaaaatgaaatacaagggtacttacgtttcgcccgaaacggatgatgtggacgcacgaaatcagaaggaactgaatttcagccttgaagaggcgaaaatgatagcggagatcaacccgcagatgctgtctctccgcgaactctacacagtcgccctgtcttatacggaagacaaagcccggttttacaagattatcaatattagcgtcaagctatatcccgtacatccggttgccaacctgaatgcagcagctgccgccatagaacagggagacgtcaaatcggcaggtaaattcctttcaatggctcttcacgacagtctggcctataaaaactgccgcggagtatacgaactaatgtccggaaacacctacgaaggcatccgaatgctgaaagccgccaaagccgaaggctccgaggaagcggcatataatctgaatgcattttttgaaaacaataaacgcccttaatcaacggatataatgaaacgtttcatattcctgctcttattacttggatgcctggacgcttactcacagaaagcagctatcagggtgaatgcgctttctgccatagacggagctttcggagggggaatttcgtatgccataggaaacaagagcacagtcgagcttaccggaagcctgcgaccgtggaagcggaacgaagaatatgtcaaccgttactggctcctgcaacccgaatacaaatactggacttgccagaagtataacggtcttttctggggagggtatctgaacggtgcccaattcaacatcggaggtaagaaactgcctttcggcatattctcccaactgaaacgccaccggtacgaaggctggctggcaggcggaggcatcagctgcggatatcactggatgctgaatgaccactggaacatagaaacaagtgtaggagtaggatacgaatttatccattacaggcaatacaactgcgtagacaaatgcgcaaagctaagagaagaaagaaaatatcattacgtaggacctagcaaggcctctataagtttaatctacctattttaaagaagaaagaaagatgaaaaaattatggaaagtctggttctccaaacgaagacatctctacatagagatagcacgcaaacaccggtcaacaccgtggagggtgtaccatctgggacatggtggcagaggaaagacattgaaagatatgaggatattggaagaacttcagcaatacggaattatatctcacatctatccttggtgaacaggctatttttaaatatagatccattattagtacgactatgaaactgggaggagtttttatcattgcggtcatagcatctctatcgctacaggcgcaaacgaccgtagaagaagctaacggaacgatccgagctaccgcttccagccttcacaaggcaggggaagaactggtggtttctatttcggtagaaatcacccgcgacctttcgtccaacgaatcgctggttctcgtacccgttgtcaccgacagtctggagaatcggttggaactgccttccatctacatcaatagccggaaacagcaaatcatattcatgcgcgaaatgggcaaaaaggagaaagatgcccgttcgctacaacgaaaaaacggaagcaggcaaagcatacattatctgcaatccgttcctttcgagaagtggatgaatcatgctacactctccctgatagagaaaagttgcggttgtggcatcgccggcgaagaagccttcacttgtatcgcccgtctgcatccgcaaccgatacctgtcccgcaactcgtatttctcaccccacaagtggaggggctgaaaaccagaactgagaaaggatgcgcattcatcgactttcccctaaacgacgccatcatacatgaaacatacagcaacaatgcgacggaactgaataagatcactcaaaccatagacgccatcagaaatgattcgaatgtaaccatcacacatatcagcatacacggctatgcatcgcccgacggaccttaccaactcaacgaaaggttatcccgcgaacgcacacaggcattgaaggaatatgtgtgccggttatacacgtttaatccaacggatattcatacttctcatactcctgaggactgggaagggttcgaagcccttctcactgatacaacctttcagcggaaggaggcagtcatgaaaatcgtgacaggcaacctgcaccccgaccgcaaggaagagaagttgaaaaaacaatttccggcattctatcgctttgtgttggaacattggttcacgctgctcagacattccgattataccatcgaatatcatgtacgtcctttcagcgtagaagaatcacgaaatgttttcgccactaatcccaagaacctgagtcttgaagagatgttccgcctcgcactcacctgtacgccgggaagcgaagcatacaacaaaatcttcatgactgccgtacaattattcccggataatcctgtcgccaacctgaacgcagcctgcatcgcactgatgcaaagagacgtgcagtccgccgcatattatctggagaaagcaccggaagtaccggaaacagcatcggcaaaaggtgtcctgcaccttcttcaagagaattatgaggaagcggaaacactcttcaaacaggccaaagctgccggactgtcacaagctgacaacaatctgaaacaaatattagagcttaaataaatgtttaattaaaatcaatggtaagatgaaacaatttacaaaactaatggcaatgcttctgtttacagcagccacacagtacagttgcatcaatgatgcagatgtagcaatccccgacaaaacgcagtcggactcgaacggcaacgtagccctgttccttgaaatcccgaatgttcccgccagccggagtgccgaatcatcgggtgtaaccgaagaaggctcgaaagaagaatatgcggtaaaaacccttacggtctacttctttgactcagccactaaaactttcgttgagtcccagcctcttgaaaacatcacactggcaggaacaagcggacaaaagatacactacaccaccaacaaaatcacaatgaaaccgggaacttacaacgtattcgccatcgccaatggtgaagcaatcacagcggacatcgcaacacaggacaaattcctcggagctatcgacaaagtgacatacagcgcaggaaagattccaagtgtacccgagagaggattcgtaatgaccaaccgtggtgccgcaaatctgaatgtcgaagtaagcaaacccacagattccgacaaagtaaccgacatttccattagcctggaacgtgtcgttgccaaaattgaagtgacacagacacaggagactttccccctgaaagacccggccggaaaaacttactgtacggtcaaactcaataacttcagaatgttgaacctggcaaccgaattctacactttccgccatacagccgtgctgaccagccttcaggaaccggactcatacactgatgagaacttcggcaacatcaacgataacgacggttatgtaatagacccttacttcttcaagaaaaccgtagaaggtgccaaagacttcaagaatgaggacggtttctttgcacaggcattggtacagcttaacattgacgacagcaattgggcaggcatggctccggcaaatagctggtcacgcatctactgtctggagaactgtatgttccgtcccgcccagctaaatgcctataccacaggagtgatgttcaaagcaagtctcgacattgccaccgaccgcgtattcaacgaaagcggagaaacagtaagcaacccgtccaactggccgaccaacctgttctacttcaactacaacttctacaccagcgtaaatgcaatcagaaaactggcactcaacaacctgcccggagacattaccgacaactcgacaacagaagagcttgccaaatacagcatcaagcgtttcaagaaaaccgaaaactacgcatgctactacaactactggatcaagcatgaagacaacaacaacgacaccgaaatgggagtcatggaatttggcatcgtacgcaacaatatatacagactgtcagtcaataaagtagcaggcctgggcagcggcgaaccatttatcgaaccggaacaaccggatgaatacaaagcagaactgaacatcaacatcgatgtttttccgtgggccgtacgtaaccaagatgtagaacttgaataagtatcggccactttgaactaaatttattaccaatgcgtccatttttactacatattatctgcatcgtcatgctgttctcatcctgcaactgggtgaacgacgatctgtcagactgccctaccgggacctggttgaaaatctcgtatacctataatatactagatgtggatgccgcttcctcgcaagtaggcgacatcaccatttttgctttcgacaagaacaacaagtatgtggacagactggacgtagacagtatcgcattacatcaaggctactgtatggtaagagtgccgtttcccgaagggagctatcatctgctcttgtggggaggagcctccgaccgtcaataccggttcccttatctcaaaaccggtcagacggaacggaaatcattgctcctttcattgatatgcaacagtgaaaaacagatgaacgggaaattgaacgacctcttctacggtagccttgaaaatataactatcagtaatgactatcaggtattggatgctcccttagtcaaaaacaccaattatttctcatgcatccttcaggatgaaaacaacaacctgctgaatcaggaagatttcactttcacactggaggccgccaatggtgtgatggatcataccaacactccgttggggacggaaccggtttactatcgtccataccggcaggaagtcagtatactcaatgaagaagaaatccctgtcattcatgcccggttgaacacattgcgcatcatgaaaggagatcagaccacattgaccataaagcatatacccagcggacaggaaattctacgtcttccgctcacccagtatctactgttatccaaaatccacagttataccggcaatgagatgggcgatcaggaatatcttgacaggcaggattcttatacccttttattcttcatacagtcatcggatatggggattccgaagatatgcccgagaataatggtaaacggatggaccgtacggctgaatgactcagaactggagttttaggaacacatgactgattgtatgcgtacggaatttaggtgagatgttctacagaaaaggctactgtgaagtatccgagtggtattttataccctttattcgcatgtttagtttcccacaacatgctaaatttccttataaaacggcacttcattgaaggactgttttattaattgtttgttttgtttgtgttggtgcacccgtccaagcgaggatgggtgcacttttactccttcaataaaaaactatcactgtcatttgcatacatgacaaatgatacgttggtttatatccgtatatctataaacgctctactgtttctgatagttcacaagcatactcctttagtcgttaaaacaatcatccgattaaaagaaaagttgcaaacacatcgttttttcaaaatcaatgtaacaataagaatggaagtccataaacttttatatataataaggtataaatatagcacattattcatactcttatagacggagatatttttttcgaaaaatcgtaatctcatattttattgaaaatcaagcactatagagtcaccatgcagaaaaaaagagaaaaaactacatatttttttcatgaattgtttgtcagtttcaaaaaagttcctacctttgcatccgcaatcgagaaacaaacactgattcgagagagcaaaaagcagaaatgcaacaacaggatggcccgttcgtctatcggttaggacgcaagattttcattcttgaaaggggggttcgattcccccacgggctacaagtaaaaagaataaagaactaaaaaatagattagtcgaaatggcaaatcacaaatcatcactgaagagaatcagacaagaagagacaagaagacttcataacagatattatggtaagaccatgagaaatgctgttagaaaacttcgtgcaactactgacaaaacagaagctgttgcaatgtatcctggcatcactaagatgttggacaagttagctaagacaaatgttattcacaagaacaaggctaacaatctgaaatctaagctggctctttacatcaacaagctcgcttaataatagaaaaataacaattctatatagcattcaggctgaacttttaagttcggccttttgtgtttataaaccactgaatatcagattactttcccattcactaattccgcttttattctacatttttcacctccgaaacttcgccaactcgacaattttcactatatttgctctgttattataacttagaaaggcaattatgagcgaagaacaaatcactcccaataacgggtcttattctgcggatagcatccaggtattggaaggtcttgaagcagtgagaaaacgccctgcgatgtacatcggtgacatcagtataaagggacttcaccacttggtatacgaaatcgttgataactccattgacgaggcactggccgggtattgcgaccacatcgaagtgacaatcaacgaagataattcaatcaccgtacaggacaacggacgtggtattccggtcgactatcatgaaaaagaaaagaagtcggcactggaagtagcgatgaccgttctgcacgccggaggtaagttcgacaaagggtcgtataaagtttccggaggtttgcacggtgtaggtatgtcttgcgtaaatgcactgtcaacacacatgactacacaggtattccgtgatggtaaaatctatcagcaggaatatgaaatcggtaagccgctttattctgtgaaagaagtgggggtatcggatattacaggaacccgccaacaattttggcccgatgatacaatctttaccgaaacggtgtatgattataaaatactggcttcacgtctgcgtgagttggcatacctgaatgcaggtctccgcatttcactgaccgaccgtcgggtagtgaatgaagaagacggcagcttcaagagtgaagtattctattccgaagaagggctgagagagtttgtacgcttcatcgagtcttcacgtgaacacttgatcaacgacgttatctatctgaactctgagaagcagggaatacctattgaaatagccatcatgtacaatacaggattctccgaaaatgtacattcctatgtcaataatatcaatacaatcgaaggaggtacgcatcttgccggtttccgccgtgcactgacccgtacgctgaagaagtacgccgaagacagcaagatgctggaaaaggtgaaagttgaaatctcgggagacgacttccgcgaaggtctgactgccgttatttccgttaaagtagccgaaccacagttcgaaggacagaccaaaacgaagttgggtaacaacgaagtaatgggtgccgtagaccaggctgtcggtgaagtactggcctactatctggaagaacatccaaaggaggcaaaaacaattgtagacaaggtgattctggctgccacagcacgccacgcagcaagaaaagcccgtgaaatggtacaacgcaaatctccgatgtccggaggcggtctgccgggtaaactggccgactgttcggataaagacccctcaaaatgcgaattgttcctcgtcgagggagactcggcaggtggtactgccaagcaaggacgtaaccgtatgttccaggccatccttccgctacgcggtaagattctgaacgtcgaaaaagcgatgtatcacaaagcactggaaagcgatgaaatccgcaatatatatacggcactgggtgtcactatcggaacagaagacgacagcaaagaggctaacatcgaaaagctgcgctatcacaagattatcatcatgaccgatgccgacgtcgatggttctcacatcgacacactgatcatgacattcttcttccgttatatgccgcagattattcagaacggttatctgtacatcgctactcccccgctctacctctgcaaaaagggtaaagtagaagagtattgctggacagacgcgcaacgccagaagtttatcgatacctatggcggtggtctggaaaatgcggttcatacacagcgttacaaaggtttgggtgaaatgaacgcccagcagttgtgggaaacaactatggatcccgacaaccgtatgctgaagcaagtaaacatcgataatgccgctgaagccgattacatcttctccatgctaatgggtgaagacgtaggtccgcgccgcgagtttatcgaagagaatgcaacatatgcgaatatcgatacataattttaatattacgtttttataaaccaacctcacatcttacaacgaagaagcgtcggcaagcgaaggaaaatcctccgtgccggcgcttttctatgtcttaataaaacctaacagttaaatctttttccggtcaaaatcactatcttgccgaaaatgaaggaggacacttatgaaaacgactaccccaaatcctgtatttgccaagatcagactctatctcagaattctggcatcctgtgtaattgtcacttgcctgttcctgattattatccatccggaagcatggattactccggcttgcattatcgtagctatgatctgcctgttatttcttctgatacgatccaaacgcaaagagtcgaggaaatgaaagaaatatcagatcatatcatgcgcctttaattccttcactgcgacttccagttcctggtaccacttctcgccgaatttacggatcagaggttctttcaagaattggtagacagccacgttttcttttttccccagcaacacagccgccttacacacatcccaacgatgatagttcaccgccttataaggtccgtaatctccaatccgaatgggatagagatggcatgataccggtttgtaaaagtctgtcttgccatcccgataagccttttcgatggcacagtaacaacatcctttctcgtcatagcaagtaaagacgcaatccttattattaacaatagaagtcaccagatcaccttcctgatccgtgtatacgactccttgcttctcaatgacagcacgcgcttccggcgacagttcctcccatattatcggcagaacctcttccagcttttccacttcatccaattccacaggtgcccctgcatccccttcaatgcaacattcgcccttgcaggcgtccagattgcaaaggaatttttcccgaaggacatcgaagctcactactacatcttctatctgaatcataaaacttatgtgagacaaaaagggcggagtatccccccgcccctttggttatagcattctaaattacttaatcaaaatctgaccgttcatatcagccggagcttccagacccatgattttcaggatagtcggagccacatcagccaggcgaccgtcttctactttcgcagctttgttttctgttacgtacacacaaggaaccgggttcagagagtgagccgtattcggagtgccgtcttcgttcaaggcatgatcagcgttaccgtggtcggcgatgatgatagcttcgtaaccttgtgctttagcagcttcgatcacgtctttcacgcaagcgtctacagccacaacagccttctcgattgcttcgtagataccggtatgaccaaccatgtcaccgttagcgaagttcaccacgatgaaatcatatttgttttcgttgatagcgtctaccagtttatccttcacttcgtaagcgctcatttccggtttcaggtcgtaagtggctactttcggagatggaacaaggatacggtcttcgttgtcgaacggagtttcacgaccgccgttgaagaagaaagtaacgtgagcatatttctctgtttcagcgatatggagctggttaagtcctttggaagcgatgtattcgcccagtgtgttggcaacgttttccttgtcgaacaggatgtgaacacctttgaaggatgcatcatacggagtcatgcagtaatattgcagtcccggaatcgtatgcatacctgcttccggcatatcttgctgagtcagtacgacagtcagttctttggcgcggtcgttacggtagttgaagaagataacgacatcaccttctttgatggttccgtcgcagttggcgtttacaatcggcttgatgaattcgtccgttacaccttcatcgtaagattcctgcatagcctgaaccatatcggtagctttcttaccctggccgtttaccagcaggtcataggcttccttcacacgttcccaacgtctgtcacggtccatagcataataacgtccgatgatagaagcgatcttgcctgccgatttctcgcagtgtgcagaaagttcttcgataaatcccttgccactcttcgggtcagtgtcacgaccgtccatgaagcagtggatgaatgtattgtcgatgccgtattctttggagatgtcgcaaagtttgaaaagatgaaccattgagctgtgtacgccaccgttggaagtcagtcccatgaaatgaacgctctttccgttttctttcgcgtaagagaaagcagaaacgatttcggggttctgcaggatgctgttgtcagcacatgcgcggttgattttcaccaaatcctgataaaccacacgtccggcaccaatgttgaggtgacctacttccgagttacccatctgtccgtcgggcaaacctacgttctcaccacttgcctgaagttgggaatgaggataattgttcatcagataatcccagtaaggagtgggagtgttgaagattacgtcgtctttcttttggtcgcctagtccccaaccatcgaggatcattaaaagggctttcttactcataatatttcaatatttaaattatcactctgattttcgggtgcaaaggtacaaaaaagatgattacgtaaacgtttaatctatgttaagttaaaggggaaaaagagagggagcgatggatatttttctttctttgtatagggaactactaaacgcatttattcaaaatttaatattatgaaaacgattctactctgcatgatgctcatgctgtcgggtatgctcacagcacaaaccgtcgacaatccgccattcaaagcccgttcgggaagtattggtaacatcacccgtatagaacgcacgcccgatggcacgcgtgtttatattcacgccatcttccgtccgcactggtggataaaggaagaaggagacagttatctggaagatgcagccaccggcaagaaatatcagttcaagagtgcggaaggcattgagctcaataaagaagtgtatatgcccgattcgggcgagatggactatgtgctcgttttcgaagccctgccggaagagacgcaggtcatccatctccttagtccgagcgatacggaaggaaatacgtatgacatatctttagtaccgtcctccggcaaaaacgtttcgccgttggcggcaatcaagggaaactggttcaaggcagatgatttaaacgcctgggaatacggcatctacgattctgttacgattatggacaaccggatatttaccaacgaaaacatccgtaagaaagggaagcgggtggaaatcaccgtcaaggacaagcagaatggagacatacgcaccctgctggtgactccgcagaaagacggaagctgccagatacaagtgaatggagaaaagaatcagctgtatacccggcaaaggggagctaccaagacaatcgctgccgacacaggctttcagcagttcttccacacagataccacctgtctgcaagggtatatcgatggctatgaccgccggctgggatttgacaccggactcatctatctatccaaccatatcacccgccaggactacccgactgtgattcagatagacgaagacggcagcttcctgtgcaagtttgtcatcaagcatcctgtagaacagtcggtcacgcttgacaacaactggattccattctatatcgagcccggacagacgcttaccatgtatatcgactgggaagcattgctggcacgcagccgtgcacgcgactattatttcccgatcaagaatacagcctacatgggtccgtcggcttccatctcctatctgctgaaggaattcaaggcgctgatcccctaccgttacgatgatttatccaacgcgcgcaacaaactgactcccagccaatatcaggagcacatgaagccgattgtcgcccgatgggagcatacagccgattcacttattcagatttgccgcccatcggcaaaggctgcccgtctgatcaagaataaggcagacctgcaggcaggaggcttattcttcgactttctgatgagcagagattattatgcgaagcaggatacagccaaccaagccttgaaagtgaaagaagaagattcttattacgacttcttgaagaagatgccgctgaatgatgaaacagtgctcgccgatgccaatgcaagctcttttatcaaccggtttgaatatatggacgccttcagaacagcctataattattatgcaccggagccaaaggataccatctcttacacgtatccggaagaatcgcttctcgctttccttaaagagaaaggagtaaaactgaatgcagaacaggaggcaatcagactgaaacaggagaaactggcaggaacaaccgtcagaatccccttaaaagaacttcaagaagagaatgacaaggtgaaagacttatacggaaaagaagaaaaactggtcctggagtacatcgacaagcagtataaaaacaagcagtcagagcaagacatggacagaaactttatctcgatggaacaaaaaaccagtcataagaaagacagcattcttgcccggctatatgatgtgcccgatcctttgctttggcaaatagccaaagtccgcaacctgggtttcagcctgcagaatatcaagacacgttccattgcccgtgagtatgtggacagtatcaagcaaaagctcactcacccacaattggcagaagaggccgaatatctgttcgccaaaacgcatccgaaggaaaaggtcaattcctatcaacttccggaaggcaaagccaccgacgttttccgcaacattattaagaatcatccgggcaaagtcttgttcgtagacttctgggcaacaacctgcggaccttgtcgcgcaggaatagaagcgacggcagacctccgcaaaaaatacaaagatcatccggagttcgagttcatctatatcaccggacagaaagactcaccagccggtgcatataagcaatacgtggaaaagaatctgaaaggagaagccagctattatgtcaccgactcagagttcaattatctgcgccaacttttccgcttcaacggcattccgcactatgaacttgtgctaaaagacggcagtatctccaaggaagaactggggacgcatagaatcagaaagtatttggaggagcacttccccgtttccgaatctgccggacagggagaaaatgctcagtaatcccggctgaacctaagtggaacacattgatagcgaagcatctcttcttcagtttatactaagaggagatgcttcgacaagttcagcatgacaaatactctctagaaataaatgcttttctattgtcacttatcacctttcgaagataacaaactgataataaacacacttcgggtgataatagctggtgacaatagggtgataataaggtgataatagccgtaaatcatgctttttattgtcactttacccctatttcacgacttattacctgtcacttcctccccatcttattacctattacttattacctgttacttattacctatcacgcctcatccgagccttgtccttatacaacaaataccataagctaccaatgcttttagctcatcatgcctttatacttccattaagctaccgacatctttacctgttcacggccgtgacaagacctgatcacatccgtgagcagcgtttaccacgaccgtgagcaactcttaccacggccgtgaacaactaacaatgtcggcaccttatcccaactttccttataaggaaagtctactatgtaaggagctaacgggaactttagcactatcttacaagtgattttaccatagccaaccaatgaactccccgcatgctgaaagaccataaacaacaagaaaatctaaaaaaagcgatgcaaaagacggaacctcggttaattttccgtacttttgtatcgcttttaaattaaatcatagaaaaatggacgattcaaacccgcgaacgtgcacttatagtattaattaaagcgatcagagtcattgaaaactgatgcctctgctcgtgtaaacaaacgaaaggaggcaataagatgagaacatatctttattgtgaagctggctttgtggaaaaaccgcaatggcttcctaactgctgggtaaatgtagtatgcccggacaacgatgactttgagtttctgactaaaaccctgaacgtacccgaatcatttctgaacgatatagccgatacggacgaacgtccgcgaaccgacacggaaggcaactggctattgacgattctgcgcatcccgatgcaaaacggtcagaacgaaagtcttcccttcggcaccgtacccatcggcatcatcaccaacaatgaaatcattgtatcagtctgctaccacaatacagacctgctaccggacttcatcgaacacacccgccgaaagggaatcgaagtccgcaacaaactcgatctgattctccggctgatttattcgtctgccgtatggtttctgaaatatctgaaacagataaatctggatatcagcgccgccgaaaaagaactggaacgcagtatccgcaacgaagacctgctccgtctgatgagactgcaaaaaacactcgtttacttcaacacctccatccgaggaaatgaagtaatgatcggaaagctgcaaagtatctttcaggacaccgactttctggacaaggaactggtggaagacgtgattatcgagttgaaacaggcatttaataccgtgaatatctacagcgatatcctcaccggaacgatggacgcctttgcctccatcatctccaacaacgtgaatgccatcatgaaacgcatgaccagcctttccattacactgatgatcccgacattgatagccagtttctacggaatgaatgtggatatccatctggaagagatgccgtatgcctttgcactgattatcctgtgctccgtcgtgctgtcgacattagcgtttatcgtattccggaaaatcaagtggttctaattcaagcgactgccattcaagcagttctaaatctccctttacgtcagagacataaaaaagcagcctgtcattcttaagacctgaattcaaggtcggcgatgacaggctgcacacaatacgttttttgttcgatagagaatattaaaaagagaatgtttaagagagagaaattattttatccttctttactggatttctttccgcccaatggcacagaaataccaacaaatccatttactgtctttgtactttttccaaagaacatatagtccgtaccgataaacaaaggcccaagtttcacagccaaaccaaatgatttaccagcactctgaatcatagaataactgattgccgcattcaaccaacttttcggacgaatattagccgaaagtgtaatttcagtctgagttttcggcttagtgaagcgggtagtggaaagagcaccaatcgccaaccatttatccaacagttcatactcagcaccaattactactgtagaatgaagagaagtggtacgagactcaacaacatcttctttttgcagttggagcatttcgtaattcaaaacatccccaccttccacacgattcataaaatcttgggcatcccgctggaaatcctctaacccttccggagtaagtgcatagtctttgccatcataatccatacttcctttagctgttgcaacacttgtactcccctttgaccacttgataaaacccaaatccaacacagaagcagacactgtcaaattatcaagaatcttataagatgcccctaaatcgatggcaccaccataacctgcaatgccaaatccgttaaaatcaaaatcatcaatatagtgtttccgaggatcaggatcactcgtattttccaccaaatccattcctttgaaagagctctcaagacgcgcatttactttcattttagcatgataatcacgaatctgattgacatcagtaatatcgttaatgtttagtggcaaattcgcatctacattcattccgtctaccttcaaattcaagttacccataccaagtaataccttaaatttaccacctactgacaagcgatcattaatagcgcgggcataaccaataccaacttcagtataagcatttatattcaattcttcctttccaatatcaaattttgaattattccaactgaaaccatcttgatcaatatcgtgcaagaagctaaacatggacttaggtatctgagcacctaaatctacacgggcacctacattaaccgaccaaaagttctttcctttataccatccgaaagagagaatatccgtattgacattgacattcaaccggttatcattagacaaacgattcatgaatttctgattattatagaaaccatcactattatcaataatatctataatatcttgtgtacccaaagaatttgaacttgccgatacattcaacgaaccaattgccggaatattaaaatatccgctagtcggtgccaaagccggattcaactgcatacgataatgagtaccttccataaaatatgaagtacgtaaaaactgcgcattggcaggtaaaacaaaacccatcataagaagtaaagcccccatgaacttcttagatgcataaagtctgcttgttgtcatgattttatctttttttaattcttgttatcgaatgcaaatatatagcatttaagtaacaaataaaagcacaagtcaacacttttttagcataaaccgaacattttcatggctatttggagaaaattcgtgcttattctgcaaaaatatgtagaaagtgaaacaaaaggaaatatcagaaattcaggttcaactgcccgtcaccaagcagattgaaggtcattcggtggtaaggggtcgttccatgttcggcgatggcggcacgatgttttttagtcgggtatcctttattcttattccagtcataaaacggatattcttcgtgaagacgattcatataatcatctctgtaggttttagccagtatagaagcggcggctatcgagaggtattttccgtctccttttatcacggtagtatgaggaatgtcaggatatttattgaaacggtttccgtcgatcagcaaatgctgaggacggacagagagctgatcgacagcccggtgcatcgccagaaaggaggcgcggagaatgtttatctcgtctatctcttcgggcgacaccactcctaccgcccatgccagcgcttctttctctatcacttcacgaagtgcgtagcgttgcttctcggtcagttgcttcgaatcattcagcagctcattcttgaaatctttaggaagaatgacggcagcggcatacactgatcctgccaggcaaccgcggccggcctcatcgcagccggcttctatcaggtctttatttaaataaggtagtagcatacttattctttttttcttatttgccacaaagataaaggaaataaaaaaggagacctcattcaaagtcccctttttccgtcattcattcacacaaacaagcaattgttccccaaatatattctaccggttcacagccttgacgaccggaaccatcaccctaccattcgttttacagattttgttcgttgataacatcagcctttccccttagccattatgatagatttcttccatttcccctttataacttataatatatcgtcttgcaaaagtatctaaataataagagacgagaaaatggctttgagcgagtatttgcatgaaatgccccgaaacaggatcatctgccggaaaaaagtgattaagtgcgcaaaaaaggtgtttacccggttctatataatcagaaagcgataaccggacttatctccggctatcgccctcttcaataaacaaaccttcttttagttaaaacaaactccaggcgacggtaagccctgccatcacaatggctaccatgctcataagcttgattaaaatattcagactcgggccggaagtatccttaaacgggtcgcccacagtatcgcctactacggttgccttatgcacttcaccgcctttgcctccaaagttcccctcttctacatatttcttcgcattatcccacgcaccgcctgcattggccataaagatagccagcacaaaacctgtgctcaaaccgccgatcagcagtcccagtactccggtcactccgaagattaatccggtagcgataggcgcaaggatagcaatcagcgacggaatcaccatttcgcgctgcgcacccttggttgagatagccacacaacgttcataatccggctcggcttctcctgtcagaatgcctttgatctcacggaactgacgacgcacctcatctaccatgtgtccggctgcgcggccgaccgcattcatcgtcaatccacagaacaagaacgccatcatcgaaccgaggaacataccggaaagaactttcggattcatcagcgtcacgtcgtaatagttcatgaaatcgacaaaggtagcattggcggttgagacaacatcgccgttcggcatactcaggtctactgtccccaaacgggtcagaccgatacggatttcttcgatataggatgccagcaaagccagtccggtcaatgcagcggaaccgatagcaaaaccttttccggttgccgcggttgtatttcccaaagagtcgagcgcatcggtacgcttgcggacttcggcacccagaccggccatttccgcattaccgcctgcattatcagcaatcgggccgtaagcgtccgtagccagtgtgattcctaatgtggaaagcataccgacagcagcaataccgataccgtagagtcccatacccacgttggaaaaatcgaaaccggaagcaagcaggaaggaggcaatgatgcccaccactaccgcaaccacaggaatagccgtagaaagcatacccagaccgataccggaaataatgacggtggcaggtccggtctttccgctttcactcagcttctgagtggggcgatatgactgggaagtataatattcggtagaacgtccgatcacaatgccgaccaacaggccgactacgacagcgcatgaaatccaaatccagttgtccaactgtaagagccacaggattaagaaggtagcagccacaatcagcacggaactcaggtttgttccgaatgccagcgagccgagcaaatctttcaccgtcgcattttctttggtgcgcacggagaagatgccgataatggaaagcagaatacctaccgcagcaatcagcatcggggcaataactgctttgaactgcatgaccgtatctgccgaatgtataaaggcggcagcacccaatgcggcagtcgccaggatagaaccgcaataagattcgtacaagtcggctcccatacctgccacgtcgcctacgttatcgcctacattatcggcaatggtggcagggtttcgcggatcgtcttcgggaattccggcttctaccttacccacaaggtcggcgcctacgtcggcagcttttgtatatataccgccacctacacgggcaaagagcgcctgcgtggaagctcccataccgaacgtcagcatcgtggtagtgattacgcaaagtttatgagtcggtgtcagtgcgtcggcgggaatcaccgcgttcagcaacagataccagaaagatatatcgagcaaccccagtccgactacaacgagtcccattaccgcaccactgcggaaagcgattctcagtccggagttcaatgaattgcgtgccgcattcgccgtacgtgccgaagcataggttgccgtcttcatacccaggaaaccggaaagaccggagaagaaaccacccgtcaggaaagctatgggaacccacacattctgaacatgaaagccataagccataattgaaaacaaaataaccagcccaaggaaaacacaacctacaatcttgtactgttgtttcagataagacatagctcccttgcgtaccgcagcggctatttttatcatttggggagtaccttcactctctttcatcatctgcttatggaagtaataagcaaaacagagggctaacactgaagcgaccggaaccagccagaaaagaatgctatccatagaattaattattaaagggttttatggaggctaaaagtatggaaatcaaacgaaaaaagcaagcaaaagagaaaaaaaatccaacttgccgattgatgcgataactctcaatgaaacgaaggtaaaacaagtaaaaaagtcttttgagaatcctgcaaaagagcatcaggccaatagctcgttagttaatttttagtcttattacgttaatcgttaacaaacccgttatttctattaaaccatgttataaagcgcctcactttgccccgaaaatttggagatagccgaaaagtccctatctttgtagtgtgtttttcatagtattagatttaaggttaacaaaagattggctgtctgggatagatagcctttttttatgcccgcaaactaactattgcctgttaaactacagggattggatgccaagaaaatgtataaggtaaaagaaatcaatctgatgccgaatagtaaatccagcctggctgccaacgaaaagacttattccagtgattatctgatgaaagtgggcatagatgctttcaccactaatcaagcctttagccgcgtgattgagcttacggcagataacttcctactgccttactcatgccaagcctttggcacgcttgtgccaagggcttggcatagcagtgccaacgcagtggcacaactgtgccaaaggcatggcacaaacattaagaacaaaaggggaaacaccgttcgtggtgaatcccctttctcatacaataaaacaatcaactaatcttcaatcgttacagcagttccgttggcagttaccatcagcatactaccgctgcctcctactgtttcataatccagatcgacaccgatcactgcattggctcctaactttgctgcctgtgcctgcatctcctgcaaagctgtatcttttgccatacgtagtacttcttcatatgcaccggaacgacctcctacaatatcccgaatacttgcaaacaagtcacggaatacattggcaccaatgattgtctctccggaaacaattccgtagtactttactattcgttttccctcaatgatgggagttgtagtcactaacatgatctttttcttcttttttagttgtttactatcctattagacgcaggatatccccaaaaggttgcaatgtcaccctaaaaaaattgcagctataccgcaaatcaatgcgatatagccgccaattagagttaaagagagagagaatttatagaaagcgcggtctcacgaccaacttaatatacctaaaatgatttttattctttcttattagacgcaggaaacttcaaatcactgcacttcaaagagacttttttagttaaagaataaaaaaaatcgctattcttgcaggaatagcgattaatatctttagaacatctggctgacgcgttcgatcccagccactaatgcgtccacttccgatcgtgtattgtacatggcaaatgatgcacgtaccgtaccttcgattccgagccgttgcatcaacggttgcgcacaatggtgccccgtgcggacagcgatacctaaacggtctaacaatgttcccaaatcgaaatgatgaatatctcccaccagaaatgaaatcaccgctccccgatctgccgcctcaccgaaaatacgcatattgggtatttccttcaatcgcttcagcgcatacgttgtcagctcgtgttcatgagcagcgatttggtcgagtccgatgccattaacatagtcaagggcttttgccagtccggtagtaccgatgtagtccggcgtaccggcttcaaacttgaaaggcagttcgttgaaggtagtcttttcaaaagagacgtgctgaatcatttctcctcctccttgataagggggcatacggtccagccattcttcctttccataaagcacaccgacacctgtcgggccgtaaaccttatgtgcggagaacaccaggaaatcggcatccaagtcttgcacatccaccttcatgtgggggatagactgtgcagcatccactagaaaaggtactccatgcgcatgagccgtcgcaatcatttccttgacaggatttacggttcccaatacgttcgacacctgaactacactgactatctttgtacgctcggtgaataacttttcatattcatccagcaacagttcgcccttgtcattcatcggaatgaccttgatggcaattcctttgcgggcagccagaagttgccagggaacgatattactgtgatgctccatcaccgaaaggatcacttcatcgccttcctgcataaactcatctccaaaactggaaacaagcaaattgatactttcagtcgtaccccgtgtaaagacgacctcattcgtgctgccggcattgataaactgccgtaccgtctcgcgggaggcttcatgcagttccgttgcctgctgggaaaggtaatgtactccacgatgcacattcgcattcacagagtaatactcatctaccagcgcatccaccaccagacgaggtttctgagtggtcgcaccgttatcgaaataaaccaatggtttaccatacaccgtacggctcaatatcggaaagtcttcacgtatcttttgaatatccattttacttattcatcatttacatattgcacatccctggcacttgttcagttcgccacggaagcgtttttctaccaacaggtgcagacggtctttcagtgcatccagacgaatcgtatcgatgacttcattgacgaatgcaaacatcagaagcaagcgtgcttctttctccgctattccgcgtgcacgcatatagaacaaagcattctcgtccaactgccccacagttgccccgtgagagcatttcacatcgtccgcatagatttcaagctgcggctgcgtgtacatacgcgcatcgcgtgtggcacagaggttgcggttggtctgttgagaatttgtatgctgggcatcaggacgtaccaataccagtccggcaaaagcaccggtcgactggtcatcaagcacgtacttgaataattcattactggtacaattcggtactgcatgatcaatggaggtgttattgtccacatgctggtttttatcagcgattgccataccgcaaagattaatctcagccccttcgccggctagcagaacttccgttgtattacgggtagttccgttgtgcagcgtcatgccattcagcaaaacattgctgtttgcttcctgcttcacgtacaggttactgatacgaaccgtacttgtatgtgtttcttcgagctcatacatatcgaataccgcattctctccagcaaatacttcgatcacctgcgttgcaaggaagttcacattatccatcgcatgatcacagatcaacaggcgtgcctgcgctccatcttccaggatgatcagcacgcgacggttcaccatgaagttaacatctgcacgaaggatattcaccagctggatgggcttctctacgattacgttcttcggaacatagaagatggctccatcctgtgcaaaagtcgtattgaaagctgttacgccatccttggaggtatcagccagcttgccgtagtacttcttcaccagttcgggatgttccgcagcgacttctttgaggctgccgaagatgactccttccggcaaatgagttttaggaagcgctttattataaaatgcgtcgtttaccacaaaatacaaggctgtgctcatattcgggacatcacacttaaacacctcgtacggattgaccggaatctgaaggcggttaaggttcagaccgtaatcgggctcgaaatacttgcttatatccgtgtatttatacttctccatcttacgggtcgggaatccgagacgctcaaaatcggcaaaagcagccgcacggggtgcattcagcacttccgcactatgcttgcagatcatggcttccgtctgagagaagagatctatgtattgttgttctacattcatcgttattctcctacttctttcttaatccaatcgtatcccttttcttccagttccaaggctagttccggtccggcggttttcacaatacgacctttatagagtacgtgcactatatccggtttgatataatcgagcagacgctgatagtgagtgatgacgatcgtacttgtttcgggagtcttgagcttattcacgccttccgctacaatacggagggcatcaatatccagaccggaatctgtctcgtcaagaatgctcagacgcggttccagcattgccatctggaagatctcgttacgctttttctcaccaccggagaaaccttcattcaccgaacggttagcaagtttattgtccagttcgactacggcacgcttctcacgcatcagtttcagaaattcgctggcagtcaacgcaggcagacctttatacttgcgttgttcattgacagccgcccgcatgaagttcaccatgcttactccggggatttctaccggatactggaaactaaggaaaataccttcatgactacggtcttccggactcaactccagcagattcttgccatagaaagtgaccgaaccttttgtcacctcaaaagcaggatttcccaccagaacagaagaaagcgtactctttccggaaccgttcggccccattatcgcatgtacttcgcccggtttcaccgtcaggttaatacctttcaatatctctttgccattaatgctggcatgcaggtcttttatctctaacataagcttatttattttttatcccacgcttccttccaacgaaatagtaagcaacttctgtgcttccaccgcaaactccatcggaagtttatttaatacttctttcgcatatccgttaacaatcagcccgatagcatcctctgtcgggattccccgctgattacaatagaatatctgatcttcgctgatcttgctggtagtcgcctcatgctccaccacagccgtctcattgtggatatccatatacgggaaagtatgcgcaccacatttatcacccagcagcaaagagtcacattggctgtaattgcgtgcattatcggctttttcagctacacgtaccagaccgcgataagagttctcgctatgtccggcagagatacctttgctgacaatcgtgctgcgggtattctttcccagatgaatcatttttgttccggtatctgcttgctgataattatttgtcacggctacagaataaaactcagccgtcgaattatcgcctgtcaatatgcaggaagggtacttccacgtaatagccgaaccagtttccacctgtgtccaggacagtttgctgtccacccctttgcagttgccgcgtttcgtcacaaagttatagactccacctttaccttcggcatcacccggataccagttctgaaccgtactgtatttcacttctgcacgatcatgtaccacaatctccacgatagccgcatgcaactgattttcatcacgcatcggtgcggtacatccctccagataagatacatacgaatcatcgtccgccacaatcagcgtacgttcaaactgtcccgtgttacgggcattgatacggaaataagtagaaagctccatcggacagcgtactcccttcggtatataaacgaaagaaccgtcagagaacacggccgagttcaaagcagcgaagaagttatcccgatagcctactaccgagcccatatacttcttcacaaggtccggatgttcccgtaccgcttcactaaaggagcagaatataatgcctttctccatcaacgtctctttgaaagtagtctttacggataccgagtccatcactgcatccacagccattccgctcaatgccatctgttcttccaagggaatacccagtttattgaatgtctttatcagttccggatctacttcatccatactcttcggtccttctttcttcttcgtcggatcggcatagtacgaaattgcctgataatcgatctccggaatacggagatgtgcccaagtcggcatttccagcgtcagccaatggcgatacgctttcagtcggaactccagcagccattcgggttcatcttttttcgatgaaatcagacggactacatcttcgttgagtccacgctcaataacatcggtgtgtacctccgtggtgaaaccatatttgtacttctcctgcgtcagttcctttacatatttattgggttcttcttgttgcatctttattatctaatatatattgttgcgttatattcttagcagcagggaaaaagattcccgcaaacgtttccataggataatataacaatgattcgctcttttttgttgcactaattaacttattatcgctatcgataaactctatcacacagatcacaaggctcgttaacaacagaaatttgagtgctcccaatccacttcccagccaacggttcagccaccccagtgagatggcttccatcgctttcgtcagcaaggacgccactaacgtgaatatcagcggaacagcgatccagatgacaataaaagccaatacctgtgcaaccgtcatcgagtccgtcacagccggacaaagcttctccgccaacgttgcatacaaagcctttgctgccagcaaaccgacgaccaatcccagaatagaagccagctgacggataaagcctttcataaagcccgccaccacaccggcacctattataataaggatgattatatcaatcgttgtcattatctctttttaaaagaaaaaggaggcacggagttgtaaatccactctgtgcctccgtatattctcgattcagtacaatttataacgtctgtttcacttctatttcttcgaatgtctcgatcatatcgcctaccttcatgtcgttgcagttcaccagactgataccgcactcgaagtttgtacctacttccttcacgtcgtccttgaagcgtttcagtgcattgatgtttccggtgaagataacgataccatcgcggatcagacgagccttgtcgcttcgtttcacctttccggtcttcactaccgcaccggccacaagtcccactttcgtgatattgaacacttcgcggatttcgatcgtagccgtaatctgttctttcagttccggagctaacataccttccatagcggccttcacctcttcgattgcatcgtagatgacggagtacttacggatatcgacaccttcctgttccgccatcttagcggcagcacccgaaggacgtacctggaatccgacgataatcgcatccgaagcagcagccagtgatacatccgattcggagatagcacccacgcctttatggatcacatttacctggatctgttcagtagacaacttgatcaacgagtcgctcaatgcttctacagaaccgtccacgtcacctttgacgatgatgttcaattcctggaagttacccaaagcaatacgacggccaagttcgtccaaagtcaggatcttctgtgtacgcaagccttgttcacgagccagctgttcacgtttgttcgtgatttcacgggcttcctgatcactttcaactacatggaacgtatcacctgcagcaggagcaccgttcagtcccagaatcaatgccggttcggccggtcccgcttctttcacgcgctgattacgttcgttgaacatggctttcacacgtccgtagctggttcctgccaatacgatatctcctactttcaaagtaccattcgataccagcaccgtagctacataaccacgtcccttatccaatgaagattcaatgatggatcctgttgcattgcggttcggatttgccttcaaatcaagcatttcagcttccagcaatactttttccatcaaatcttccacacccatacctttcttggcagagatatcttgtgactggtatttaccaccccattcttccacgagatagttcattgcagccagttcttctttaatcttgtccggattagcagtcggcttatctaccttattgattgcaaatacaataggtacacctgctgccatcgcatgattgatcgcttccttcgtctgcggcatcacgttatcatcggctgccacaataatgatcgcaatatccgttactttcgcaccacgggcacgcatagcagtaaacgcctcatgacccggagtatccaggaacgtaatacggcgtccgtcttccaactgtacgttgtaagcaccgatgtgctgtgtaatacctccggcttcaccggcaattacattcgccttacggatgtagtcaagcaaggatgtcttaccgtggtcaacgtgtcccatcaccgttacgattggagcacgtggctgcaaatcttccggagcatcttcttcttccacgatagcctgtgccacttccgcacttacatattcggtcttgaaaccaaactcttcggctaccagattaattgtttccgcatccagacgctggttgatggaaaccatcataccgatactcatacaagttgcaataacctgattgactgatacgtccatcatcgttgccaactcgttagccgttacgaactcagtcagcttcagtaccttgctttctgccatttcctgatcttccagttcctgcatacggttggaagccatttcacgtttttccttgcggtacttagaagtcttgttcttacccttggttgtcagacgtgccaaagtttcttttacctgctttgctacatcttcttcgctaacctcctgcttgataaccggcttcttgaagcgatccttattattattcttcttgttgttgttattattattgccctgtccctggccttgaccctgaggacggggatggttgccaccacctttaccggtctgagtattgggtctcggagcagcaaagttggaagttgccacattgttgacatccaccttctctttgttgatacgattccgtttctttctggcagcatcggcattattatcttttacgcccggttttgcctgtttactgtcctctttacggatttccttgatgatagcttccttcatcagtttcttctgatcctgacgaactttttctttttcttcgcgttcacggcgtttttcttccttcgatttcttcttaggacgggtagactgattcaatgcagccaggtcaatctgaccgatgacattgatcttcgctcccagttccggttgacggattttaaacacctcattttctttcgacgcattttcttcagtcggagttgtcactgttgcagttacttctgccgttctttctactttacgttcttctgccttcacaggtgcagtttctaccaccttcggctcttctttctttacttcttccactactactttctcaacttctaccggttttgtctccactgcaggtttcggcgctactactggctgttctactggtgcaggtttcggtgcaattacttccaccttttccactttcggctcttcctttttcacttcggattcaaccactggtttctcaacgactgttttttcagcaacgggttgctctaccacaggttgttctactacaggttctactttcttttccggcgctttttctactttatctgttctccgaccgctgaatttatccaaatctatttttccgacaggtttaaacttaggacgtgcatcctccggtacgactgtcttaatcacatcttccgacttcggtttctcctgctgcttctcgaagccctcgatagataccgatgccttattacgttccttattctgacgttcctggatgaaacgctccgattcaagtctaaggttcttgtctgtactaaactctttaacgagcacagcgtactgctcctcactaattttggtattaggattagcctcaacggtataccctttcttttgcaggaactcaactaccgtcgcgattcctacattcaaatctcttgtaactttgtttaaccttatcgtcatatttaaaatttaatgaataaatggagcgaagaaaattcaatcgtaatgcatattactcttgtgttggttcagcttcaggttccgcctctgtctcaggctccatctctgctgccggttcttcttcaaactccgatttcaaaatacgtattacctcgtccactgtctcttcttccaggtccgtcttttcaatcaacatctcgcgaggcgcattcaacacagccttcgcagtatcgataccgatagccttgattgcatcgatcacccatccgtcgatttcatctctgaactcgtcgagatagatatcctcgtcagccacattctcatccaattcacggaacacgtcgatagtgtactcagtcaacatactggccagtttgatattcaaaccgcctttaccaatagcaagcgatacctcttccggtttaaggaatacctcagcctttttctcttcctcattcagacggatagaagaaatcttagccgggctcaaggcacgctggataaacaatgaaatgttcgatgtgtaattgatcacgtcgatattttcattgcgtaattcacgaacaatcccatgaatacgactcccctttacacctacgcaggcgcctacgggatcgattctgtcatcataagattccactgcgatcttggcacgttcgccagggatacgggcaatctttttaatggtaatcaaaccatcattgatttcaggcacttccatttcgaacagacgttgcaggaaaacgggagaagtacgtgacaaaataatcttcggattattgttcttgttgtctacgcgggcaaccactgcacgggctgtttcacctttacgataaaagtcgctcgggatctgttcagtcttaggcaacagcagttcgtttccttcatcgtccagaagcaacatttcctttttccagatctggtatacttccgcgttgatgattgtacctactttatcaatatatttattataaatactgtccttttcaagttccagaatctttgaagccagtgtctggcggagattcaggatagcacgacgtccgaacttggcaaagatcacctcatcagtcacttcttcgccttcttcgtatgaagcatcgattttctgtgcttccgtcagcgaaatctgcatattggggtttgtcaaatcttcatcggccacaacttcacggttacgccatatctcgaagtcacccttgtccgggttcacgatcacgtcgtaattctcatcggtgccaaacattttcgcgattacgctacggaacgactcttcaagtacgctaaccatcgtcgttctatcgatattcttcagttccttaaattccgaaaatgtatcaatcaagctgattgtttcttcttttttggccataactatttaaagctaattaagtatttagtatattttatttgctcataagtgaaggtttcgtcctcttcaatcagcttcggacgcttggaaccttcgagttttaccttcttctctacgcctaccgtaaacttctcttcatcggcatctttcaggatacctgccagtttacgtccgtctctggtcactacttccacctcttgtccgatgtggatgtaatactgttgcagcactttaaagggttgtccgataccggcagagcccacttccagttcataatcttcctcttcacggttcagtttcgactcgataaagcggctaagctctacgcagtcttcaatccaaactccttctgcgtggtctatttcgaccacgatcttgtcatccgggctcacggtcacctctaccagaaagtagtcttttccttccagccactcttcaacaatctgacaaacagttttcttttctatcatttattaactatataagaacaaaaaaaggagcttaatcgcccctccacctttcatccatttcggttgcaaagatataaataatctattcgactacaaaacattaaagaaaaaaagtatgaattaacagtcgtatattcgtatctttacgccgcaattttaaaaaccaagagctatggcacatcatctcaacaccaacaaacagtttatggtcggcaacggcattctggcttttgccgtcatttttgtcgtagttattttcatttatatgagcttacgtctgcaacgggaaaaccaggcagaacgacattatattgaaacttatacgatcagcctggtaaaaggatttgccggagattccatttcgctgttcgtcaatgacagccttatcgccaatcaagtcatgcaggaagaagcctttacaatagaggtcggtcgatttgcagaacaaagcgcactgatgattgtagacaataaaacggaaattgcatccgttttcgatctcagcgagaagggaggaacttatcagtttgaaaaagaaacggacggaatcaaacagcttgctaaataagagtctgcttaatatcaggagctccttatcccaagcaccttatatctctgtgcgatacttcttcaattctttacgcagagcaagggccttgccatctgtgaaccggtccagcaagtcccagaaacgctcactgtggttcatctcacgagtatgacacaactcgtgcagaagcacatagtcaatcaggtgagaaggcaacagaacaagataataggacagatttatattttttctcgctgagcaactcccccagcgtccctggctggagtttatcttcacactggcataaggcaatccacattgtgccgaaagatgctccaaacgaggaggaagaatacttttcgcattccgcctcaaagattcttcgatcactttacgcaaccagttctgtagattttcatcagtaaaatccgcttgaggaggacatacgatctgcatgacacccaatcgcgaattagccagaaactgctccttttcacctaagatgagagatagtttgaaatgctcggcatcaatcttatagtttaagtcaatcaacggacgggcaaccttctgacgggaaagcagcaacttacaacgaagattctcaatggcacgcttcacctctttcgtcgtggtgccgggaggcaccgaaacgtagaccgcatcgcttttggtacgaaacaccaaactgcgcgcacgtggattgacacgcactatcaaacttcccaattcatcatcttctatcactgtatccattttctcctccttaaccgatgctgcaaaaataataaaaaaagaagccggtggcgaaaaaagtgatattcaatgcaactttatagcaactcgtaacgtctaatccatatatactcatattaaaatcaactataaattatgaaaagaaacacattgactgcatggctgctcgggataatcctgatattctccgctacctcctgttttaatggccctattgtgaaaggcagtaaaaactacatcaccaaaaaagagaatctggaacacttcaatgacatcagtatgtcgggaagtgccaacatcatctaccagcaagactcctcctcccgtattgagatttacggttcggacaatatcgtagagctcctggaaacaaaagtaaacggagaaacattgaatataaaatttaaaaagaatgtcaatatcatcgacaaaggcaaactagaaatcaaagttttctcaccagacctgaacaggctgacactcaacggatcgggtggcattctctttgcgaacggcattcacaccaagggagatcttaaagtaacaattaacggttcgggcaatttaggaggaagtacattcgacaccggtcatctggccattgcaattcatggttcgggcgatgtcaggctcaaacaaatagacagcaagacctgctctgcaagcatttccggatcgggcaacatcacccttaacggcatgacaggcgcagcaaagtacaacatatcaggatctggcaacatcaaagccgccgatctggaagctacagacgtatatgcaggtatctcgggttcgggtaacatcagctgcttcgtcaacggcaaactaggcgggcacgtcagcggaagcggcaacgtcgcttacaaaggaaatcctcaggctattgatttcccccacaagaagctccgcaaactggactaaatccgtaaacatcccaaaaacataaaagggctactgcatctcgcggtagcccatttatttagttagtttcattataaaaaatttgagagaattgaaaacttcacagtttcgctttcgatgttgttttaattaaagcacactaactatattatatgtttaaagcaaatgaaaatgtcattctttcataacctgcaccttgttgatctttgcaaggctgtcagccaatgcctgatctgctttcagctcatttgacagagctaccgacggtgtggtcacttgtttaccaatggtatccgttgccaatactcttccgtcatctccggaaaaagaatgttgcgctacatttcctaatgaaaggataattgcaatcacagcagcagctttaaacagggggatgaatcttcctgtcagtgtcagacgctttgccttcactaccggagtttccacctgcgccagaatacgtgcgtcaaagtcttcacccagtcctacctcctgctgaacctgctgataaacaaacaagtttttatagcggagcaaatgagcgggtacttcctcctttgagaagaagtcgcgcaacacagattcctcctccacggaagtttcgcattgccaatatcgctccaggagctgttctatatccttataatccatattcgtcaatttctaaatacctttgttttaccttttgtctggctctgaaaaggttcactttcacttgttcctctgtcagattcagaagagttgcaatcttcttatagctttcaccttcaatgtccctcagttgcatgataagcctctgtttttcgggaagttcgttcaccagtctattgataatgttcattttctcatcatgaaccaactggtcatacggactgtttgcatcaggttcttcctccatttcgggggtgatttccacattctgagcttctttcttctggctccggtctatagccagattctttgctactatcaggcaataggcttcaaccgattcaaattgcgaccactcatcacgcttgttccacactcttatcatggtgtcctgaacgacatcctcggcttctgccctatccagggttattctgagcgccagtcgaaagagtttatccttcaacggcaaaatatcgtttcggaagctgatctcttgcatctctataataatgacgggctgggatacgaaaagttacagacgcccattacttttttttaaattatttttttatccgcgttccttcgctgcctttaatcgctgatgctaaggtaattacaacttctgtaactcctgcattaattgcttcaaaagaattctccaacttaggaatcataccaccttgaataacgccgtcagcaacgtattgttcgaattcggaacgggtaatctcagggatcacgctatcgtcatcattctcgtcacgcagcactcctttcttttcgaagcagtacatcagcgtcacgtcaaacagcgccgacaaagcctttgccgtctctccggcaatggtatccgcatttgtattcagcatattaccttgaccatcgtgtgtcaatggtgccatcacgggcaccactcctttatgaatcagatcagccagcaaagaagcatctaccttctccacgtcgcccacgaaaccataatcaacctctttcaccggacgctttaccgatcggatcacattcatatccgccccggtcagtccaagagcgttcactccacgggcctgcaaaccggcaacaatattcttgtttaccagaccaccatacaccatcgttaccactttcaacgtttccgcatcggtaatacgacgaccatttaccattttgctttcaatacctagttgtgcggcaatctttgttgccgagcgaccgccgccgtgaaccagcactttatgtccgctgatggcggcaaagtcattcaacaactgaagaagggtggcttcctcttctacgatttttccacccaccttaattacagttagtttttccctcattttttattcaattctaataagtttgccgaatggagaactcggctccggcaccttgccggttattctaagtaagtatatccgtaaagtcccgaacgataattggacagaaactctttaccctcttccaatgatatctttccttcttttacagacttggtcacccatgtttcaagggtacgtaccagttttttaggattatattgtacgtaatccaacacttccgctactgtttcaccatcaataatctgttcgatattatatcccttttcattcacagaaacgtgaacagcattcgtatctccaaacagattatgcatatctcccaaaatctcctgataagctccgaccaggaaaacagccagatagtaaggttctgttttcttcagactatgcacaggcagataatgagccacattccgggtagaaatgaagtttgcaatctttccgtccgaatcacaggtgatatcctgcagggtagccgaacgttccggcttctcatccaaccgctgaataggcataatcggaaatatctgatcaatcgcccaagagtcgggcaaggactggaacaatgagaaattacaaaaatatttatccgccagcaacttggacaatccccggaattcatccggcgcgtgtttcaagcctccggcgatctgattaatttcccgtgtaatggaccaatacaaacgttcgatctgagcacgggtcttcaaatccacaataccatgactgaacaggtcgagcgcttcttcccgaatctgttgtgcatcatgccatgcttccagcatcttattctggttcaacgaatcccagatactgtacagttcctgcacaagctcatgtgcatccggagcgatttcctcttcatcatcccattccggaagagtagctgtttcgagcacctcgaagatcaagacagagtgatgagccgtcaatgcccggccgctctcggtaatgatattcggatgcggaatgccgtttttatcgctgacatctaccaatgtagaaatggagtcattcacatattcctgaatggaatagtttacactaccttcactattggaagaacgggttccatcataatcaacgcccagtccgccgccgatgtccacaaactccacattgaatcccatagagtgaagctgcacgtaaaattgagaagcttcgcgcaaagccgtcttaatgcgacgaatcttcgtcacctggctgccaatatggaaatgaatcagtttcaggcaatctttcaatcccttgctttccataaagtcaagcgcttcgagcagttcgctggaagtcagaccgaacttgctggcatcgccacccgattcttcccattttccactgccggaagaagccagttttatacgaataccgatattgggctgtacattcaactgtttcgccattttggctatcagtttcaattcattcatcttctctactacgaggaagatacgtttgcccatcttttgggcaaggagcgccagttctatataactttcgtctttatagccgttgcaaacaatcaatgagtcagaatccgtattgacggcaatcaccgcatgaagttccggtttggaaccggcttccagtccgagattgaatttctttccgtggctgataatctcttctaccacaggacgcatctggttgaccttaatgggatagatgataaaattctcggctttataaccgtactcttcggcagcctgtttaaaacaggaagacatcttttcaatacggttgtccagaatatccgggaaacgcaacagcatgggagatgccacatcccgcaattgcaactcgtcaaccagttccttcaggtcgacggtcactccatctctccgcggtgtaacaacaacatgacctgcgtcattaatactaaagtacgaagtaccccaacccgtaatgttgtagagttcttcagaatcttcaatacgccactttctcattttctgttattcagtgtttttagtaaataattggatggcaaaaatacagatttatctacaggttgccaattaattggatattatttcttccaattggtttatataaccggtcttaatttataattccagcagttcctgcagacgttgcacagatgattcaatctgccagcggtcttccagttcgtccgcattaaagatatattgcgcctgcgtataaaaaggtgcgcgcttttcgagtgcctgaatgatgaaatccattaattcctcatcttcctttccctgaagaatgggacgttgctgcttggcaatacgcaagcgtctgaacagcacatcgggatgcacattcaggaaaacggtttttcccgtccggttcataaactccatattgtcataaaagcagggtgcccccccgcctgtagagataacgacgttctcaaactcagctacctcatgaagcatatttctttccaactcacgaaatccggcttcaccccgttccgtgaatagttctccgacagttttatgaaaacgttcttcgatataccagtccagatcaatgaacgggatattcagtttgcgggcaaaagccttgcccaaagtagtttttccggcacccatatagccggtaaggaagatacgaaccataaatgattaattttgctcacaaaattaatcatttaatgaataatgaagaatgattctctattatttaaaaacttttatccgttcttccagtggctggaactctttttctcccggctgattgacaggcactccgaacggcatttccgcaatcagatgccaatgtgcaggcaaattccatgcccgacgcacctcatcatcaatcaatggattataatgttgcagggaagcaccgaagcccacatcttcaagcatcacccaaacagccagctgatgcatcgccgaggtttgtaatgaccatccggggaaattctcctgataagacgggaaagcttcctgaagccccttcaccaccttctgatcttcaaagaacagcaccgtaccatatccacaggcaaaggaattgtcaatcttttcttcggttttcgcaaacgcttctcccggcacaatcttcctcaacgcatctcttacaatgttccataactttttatgagacttgccaagaagaagcaccacacgggtagattgagaattgaatgccgacggcacgtgtctcactgccagattgataatgcattctatctcctgatccggaataggtgactggtcggtaatcgaataataagtccgacgattcttcaaagcttcactaaaagttctttccataatagctcctttcttaattttattttcttaaactccttataaattagaacaagcttctctgccaacttgttcgattccggaatatatttgtaccttcgcaccgtcaatgctgttgacataatcattcattatcagaaaatggctaaagaaaagttctacgtagtatgggaaggagtgacgccgggagtatatgcttcctggacggattgccagctccagatcaaggggtatgaaggtgcaaagtacaaatcgttcgacacccgtgaagaggcggaacgtgcactggcctcgtcaccttacgcctacatcggcaaaaatgcgaagaaaaaaacggaagctgcccgaaccggttccgatacactgcctgcttccgtcattgacaatagtctggcagtcgatgctgcgtgcagtggcaatcccggcccgatggagtatcggggggtacacgtggcaagccgccaggaaatttttcatttcggcccgatgaaaggtacaaacaatattggagagtttctggccatcgtgcacggactggcattgctgaaacagaaaggatttgatatgcccatttatagcgacagcgtgaatgccatcagctgggtgcgacagaaaaaatgcaaaaccaaacttccgcgaaatgaggaaactgaagaactgtttaaagtaatagaacgggcagagaagtggctcagagagaacacttacactacccgtattcttaaatgggaaaccaaggcgtggggagagattccggcagatttcggcagaaaataatagccggaaagtctattctgcgacttgatcagcagcctgttccttcttatgtttaaacacaaagcggagcatcagaaaattagtgggaacagccacagcgagcacacacaagggagctatctcctgatctacattcagatacaggaacaaattgaacaatcccatatgtatcagatagttcaccaaatggctgcctccaaatcccaaagcccttttcaaagaagggttgctacggaacgtgaaataagaagtcagaaagaaattacagataaaactcgtcacatagcctatcgtgtaggcaatattcaagttggtcatttcgtattcctgcaacagataataaaccccataatgtattccggcggccaacgttcccaccgtgcaataacgaataaactggtagcgtttactcttcgattgaaatactgattttacaatttccattagtaagtagttttagttttatagttcagatgtttcattttcattcagtcagatggacgcacgaagtcctgagtcagttgttcccacactattttcagccatatcaaggtgcaaggcaaagcctttaaagcataaggcttcacataatccatccttatgaatcttgggaaaagatcggtagtagacaaagaagtcagtagaatacagaatataagtagaaacaagtttaaccccggtgtagtggcctgtgtaggtgtctttacataccagattccaacagcaatcatagcagtcagatagccataggtttcagtgccggtgctaaatagcaccataaacaaaagtgcagaggatagaaacaagaatctgaaagattcatttccgtattgccggatgcgtaaataaggaagggcaaacaaaatcattccgggaacgattatccataaatcactgaaggaggctcccgttatccgatgtaacatacccagcaaagatatgttttgattgacgctaaactgattcagcccattcttatagacaagcacatcgaaccattctttatacgaatgaacgacatattccggagaagcatagagcatcggaagcagaaaaacgatcactgcccaaaagactaatccgctggtgagtttcattttatgtttcgagaataaaaagaaagccagtccgactatcccataaagtttggtcatagtccctaatacaatcatcaaagcagcccaaaaatccttttctttctcgatcagcacatacgagaatataatcatagcggtaatacctatgctatattgctgagacaaaacagctgtaaaaacgtcatttacagaaactaatataacaacagcaaattgccactttttcaaatctaacttgctgatagcataataaaggaaaccacaattcaccagacaccaaaagaccatccccaagggtctgggaagaaccgcaaaaggagaaatcaatgcagtgaaagaaataccatacagaaaaaaatctttctgttcctgaagatattctacatataaaggagaagaagatatcgcatgccaaaaagactggctaaatataacataattgctatatgtccccttcatcatcaatgataaactgcaagctaatcctactcccatccacaagatgaatagaaagacgggattctgcacatatcctttcaacctctccaacatatcatcaataagttttttagttcatttacaaataccccctttttcatatcaggcaacatcacttcgcctcttaagtctacaggaacctctttgatgaaggtggtatcatcaagagaagccttatatataaactccgtatcaaataagaactgtttaatacgagtggacgcaagaaaagcttttcccttacagttaaacccctttaatcccccctgcgtatctgtgtgggtcagccctaacagcataaagttcaagaaacgtgaagcatgactcgccaactttctacgggtagaaagttgtgaataatacgtatgattacgatttgctacaactacatcatacccttcctcaagatatttaatcacctgacaaacagactcaatcttatatggaaaatcataatctgtataaagagccagctctgaatcagaatgtgctataccatcacgaacagcagctcctttcccttgatttatcttattgtctacaatgatagtgttgggtaagttatttgtcaaacgaagtacagcttcttccgtaaatccgcgtttggaaccatcatttactacgataaagcgaatattgtacccgttcagcatcccttccaactctttatgtttctcaatcagttgctgctcccatccttcatgaggattataacagggcaatatgacgtcaatccgttcatcatcttttttatgtagaaaaggagttggggttcttgatgtatagtcctgagttaattgttcccagatgattttaaaccagataatagcacatgggagagctttaagtgcaaatgaagttatgtattcagtcctgaaatgttttgaaaaaagaatactgcttgaagacgctgccgtcaacacaaaacagaatagcaataagcatgtattcagcacaaacgattttttatacgttggcgtacttacataccatatacccacaccaattagagcacccacatatccacattcttccgtccctgtactaaacaagaccataaataacagaactgatgccaaaaacgaaagccgaaaatttctattctcatattgtccaatacgcaaataaggcaataagaataaaacaattccaggaattatcagccacatatcgctatattcaacagcatgagtaatctttcgaaccattcctaataaagagatattctgataaaagctcaactcattaacatcattcttaacttcaagaatactaacccattctttataagaatcaaatacatattgtggagaagtataaaacattggaactacaaatagaacgaatgcccaaaatagaattccccacagaaaatataattttcttttagagaaaaggaaaaaagctaaccccacaatcccataaattttggttaatgtgcctaacacaatcatcaatgcagcccaaaaatctttttttctctcgacaagaataaaagtaaaaagaatgaaagcggctactgctgcattatactgctgagtcacaacagataaatataagccattatatgacaaccaaataataatggctgttttccatttttcaaactctaacttttttatagcaaagtacaataaaagagcattacacaaactccacaaagcagaacccaccattgttggcatgattgaaaagggagcaatcaataaagtaaaaggaatgccatatagaaataaatcaaaatattctttaggatattctacatataaaggcgtttgctccaaagcatgaaaaaatgaacgggaaaatatcaagtagttatttgcaagtccttctgtccagcttacccaaaatccccagatagccaccccaaaccacaaaattgctaatacaataggattttgcactaaccttagtataaatcttattatatctttcatttcattatatccttgtttagttttatataatctataaaacgaccaaaactaacattctttttcctaaaatataggatgaaggcatccagccttttttccattccttctcctgcatgatttcgtataataaatggcagtttccattccggatgttcatttaacgaataaaattcccacggatgaaagtatgtcacgaaatatccatcatgccgatgagcgtatttacacagccaacgataaagtgaagcaggcaaattatgacatgaaagccaaaataaaggaaaacgcagcaaaggagtaactgatgccggcatttgcatcacacggtcttttataaaaggagtacggggagtagagagccgcatatatcttcccgggataaatgtcggattcaaggaagaattatatatataccccgcctcatatacagctttttccgacacaggcatcatgcgtgcctgccgatagccataaactttggttccggtgatttcctccaactgatctttcgaccttttcagatcttccactttaaaggtccaatgatagaaaccatgagaagcaatctcgtgacctccctcctgaatgcgctttattatatcaggagcatgaagagcaaaatttgccgtacagaaaaaggtcgcttttacctgattccgttccaagcaatccaaaattcgggtagtcccctctacagaaactttaatttgctcttccattgatatgtccacctgatgttctttgggcacatcaaattcctcaatgtcaaaacttaataaaatcattccaatatcagtctagtttacgtttgttgctgtgagttgctgcaaatatgcagccacagcctataatgcttgcatatcgtttagtcttttataataaccgtctaattccaataattcttcatgacgtccacgctctacgatttccccttcatagagcacacaaatctcatccgcatttttgatagtagaaagacggtgagcaattgcaatcgtggtacgcgtcttcatcaatctctccaatgcttcttgtaccaaacgttccgattcagtatccagtgcagaagtagcctcatccagaatcaggatgggaggattcttcagaatagcacgggcgatgctgacacgctgtctctgtccaccggaaagtttgccgccacggtcaccgatatttgtattatatccttccggcttttccataataaaatcatgggcattggcaatcttagcggcctctatgacttgttccatagttgcattttctacgccaaaagcaatattattgaaaaatgtatcattaaaaagaatggcttcttgatttacattgccaatcaaactgcgcaaatcggcaatacgtacatctttaatacttgtaccatcgatggtgatatctcctccttgcacatcatgataacgtggcaataaatctacgagcgtcgattttcctgagcctgactgtcctaccaaagcaactgtctttccctttggcactgttaagttcacatgtttcaacacttctcttttaccatcatagctaaagcttatatctttaaactcaatccgatcattcattccagtcaatggtttcggattaggaatttctttaatattattttcagccttcaatattttgtccacacgttccatagaagcaagccccttggggatattgtaaccagccttggcaaagtctttcaacggatttatcacgctatacaaaataaccatataaaatataaacgttggtgcagtcaatgacgaattatgccctaaaatcaaagcaccaccaaaccataatacagatacaatcaaaattgttcccaagaactcactcatcggatgagccaaagcttgtcgcatagcaactttgttgactgcatcacgaagctcattactgcacctcgtaaaacgatttatcattctgtcctctgcaataaacgctttgataatacgcaaaccacccaatgtttcttccaactgagacattgtatcactccacttaccttgtgcctccagtgattgacgctttagttttcttccgaccttacccatcagccagcccatagccggtaataccaaaacggtgaaaagagttaacttccagctggtagcaatcaatgttataaaatacaatataatcatgatagggctctttatcagcatgtccaatgagctggtaatagagttttccacctctcccacatcaccactcatacgagctataatatctccttttctctcctctgagaaaaaaaccatcggcaaacgcattaccttcgcatataccatgatacggatatccctgacaactcctgtacgtaatggaatcatcacagctgaagatgcaaaataacaggaagttttaaataaagtcatcaaagccaaaaacagtcccagaaaaatcaaagcagtagtaggaccattatcctgaatcatttgggaaacataataatagaaattatttatcgcaacatctttaaaaccggcagttccccattccatatactcatataccttattattctctcctgttttaaacaaaatatccagaatcggaattaacaaagtaaatgaaaacacattgaatacagctgacaagatattcagcaaaatagcccatccgatatacttcttatatggcgacacaaaacgtcgcatcagttgcaaaaattccttcattatttgaaataaaataagttaaggctgcaaagatacaataaaactgtctaacagttgaaggtttcttttaataattaatacgaattatataatagccaccttcttgaccatttattcgtctatttcactccaacactactcattatcaaaagatatgggcaccacatgataataaaccccatgagatctccggtacgatttcactcccagcttttgcagaatacgccccaaataagatacttgccgaggtgaaaacttcatcttactagccttctgtattcgttgtagcaaatccgcagcaagcaaccattctcctgcctcttcgtcggtcgccgcccgataatatacctgaaacaattgctcgatcgcgggagattgctcaaactcctgattagactccgtcataatagcttcctcttctgcatcaaaccaataccgttcatttttataaagtgccgtcattgcttgtgcataaagctgctcataatcaatgggacgcaccacatcaatcactcccgtcacttcgacgccgataaaacggcgactaccggaagtgtctgtcagtaagtctttatgattactcgtcccgataaaagaagcataccgccgaagtgattccacagctgacgcattcgggcgacgggtattaacaaccggtttttgcaaaatatgtttaaggaatgattgctgattgacacctatctgatcaaactcatccatattgatgagaagaaaacgattcagatacaactcggcgtcccttttacggctaaagtcaatgctgtccgtataatacgcctgcaaacaaggaggcagaatcagacggcaaaaggtggacttacgataagcctgcggaccgattaaaataggtgaagtactgttcgcatgatttttgtcaactccacgccagtgcgccactgtactgagaaaccaacgacgaaaaagttgtccccaatgaggattatcacaaggaactctttcagccaggtcacggatgtggtctttaccgtcccaatggggaagatcataaagaaattcctcgacagggtgataaacgggaacatgatcggaattcagatatcggaccacatccttatcccaaagtttgatgccctcatacatcgcattcatcgtaatacttgccatcacccgtttgtctatggggcgaaaataaaagttgaaactgttccgctcacggtattccacgctcgaagtcagcatattgaaacgaaactcatagcggcgtttcataaactcatctgtctgcatgacaaacaattgctccggcagcaaactacttttatcggcaaaaccctcgcacgtaccatacacgttcttcaccgtctcgcgaatcaggaattcatctttcggtaaacgataatgagcacgtgcccatcgcacggtgtcttcctgtggaataccggcacgaaaacactgctcagccagacaaacaagcaatgagtgtatatcatcgcctgggcggtatcctttttgctcggcaaatgctcgggcaaatgctgcttcaaaaagaacagaaagtgcttcgtaactatcatatccgggaacaagccgctgtaaaggagaagcctgcgcctgtacctgctctcgataggtggtttcccccggcaaagatgctggctgtttcagataaacaggcatggcttcgggattaaaatacagctccgggtcgaaagttaatcggcaatactgttccagcgaaggctctcttaattcgatatcaaacggaagttggggctggtaatatttcacagccagacgataagcatgcgcatgaaagacttccgcctgttcgcgattatcaggcagacggttgtcgggatacgtaaaacgaacccatatctttacagactttcctgaagaaccgataaaagcaagatacgtctgaggcagttccttcacacactccttcacctcatcagcttccatacgtccggataacccgttgacctgaagcataacgattccattatattcggccatcgccatcaccccgttttttctgacaaaagctgccgccggaagtatcttcgggaccctctctatataatcatttttatcaccgggaagtatataaggcaggacttctctcatattagagaccagttgtgctttagtttcctttttcatctgctctacgagctgttcaatcttcaacgtacgcatcgtatttactttgccatcgtctctcacttgtgttattctcattttttctttcgctgtttgtcctgcttgcgtgtgtagggcaatatatattttgcacaaaagtactgtaaacattctatgtaaacaagtttctgatcataagtttcattcccatctcctctccctctactagaaaagaaaaaatatattttagtctcacggtctcactacttttacataatcatcaaataattaatatattataggatgagagatactttttacagaggtatctctcatcatttcctcactgaaattactctattctaacctgtctctcaccttcttttgattatctctcattctgctttccaacttccattatttaatttcagacctatacatttctccttttagaagtactttaaggcgcatatattttaccattcattatcatgcaaacaatcctataattacttgttttacaactattattgtcgtatctttgaaagacgttattcatcatactacccgggtgaaccgacctgttcacccaggtacacagatacgttctcgaaggtgcaatgatcggttcacccgggtagaacgatgaagatgtcagtaagatgacacgcagataaaggctttaaatgccgaagagataagtaacaccatatataaacaacagataaacaacaattaagatggcagtacaattcgaattttataagaatcccgttcagggagaagaagagggggaaacaagttatcatcccagagtcgtgaattttcaacacgtgactacccaaagactggcagtcgaaattcactcggcaactacctttggcaaggccgaagtggaagcaatgttaatggaactcagtcggtgcatgggcaaccacttacgcgaagggcaaagagtacatcttgacggggtcggctattttcagatcacattacaagcaacagagccgatacattccatggccgcacacgctgacaaagtgaagtttaaatcggtcagtttcttggcggacagagatttaaaaggtgagcttataggtatgcatgcacaacgctcaaagtataaaccccactcggctaccctctcccaggaagaaatagacaaaaaattaaccgggtacttcgctacgcatacggttttgacccgctctgatatgcagtcactttgccaattcacacacagtatggcggcgcgccatattcgcaggttgaaagaagaaggttctttgcagaatatcggaattcgtacgcaaccgatttatgtgccgtgtccaggacattatgggaaatagttgtaaaatagaatgagagatagggtaaaatagggtaattccagtgagaaaagaatgagagatacctctgtaaaaagtatctctcattctataatatcctagttattaggtgattatgcaaaagtagtgagaccgtgagactaaaaaaattcttttatagcagacttagatataatcacaacacccaaagaggaagcacaaatgagcttcctcttttacctaatatcgcttatggaatatcttgaataattccttcccaactatcaatccctattcgagataaatactgttcaaaataatcatcttcttcatctgtatccgctttttgataggttgtccatacaggcttggcttcaccattatgaggtgcatcggcatacttacgcaatcccaaacaagcaccatctcccaaatggtcaaaccaactatgccattgtatgccattaataccgtccaaattgttaatcttcttccaaccataagcaaatccggcagcctgatcctgcaaatcatcatcttcataagatggcgaacatgtgcccgcttcagaaagccatacagaacgtctgatagttcctttatattgatttcgggatgttttcacccacttatccaacacttccaaatttttcaaggtcacatattccgtatccatagaataagttgcctgttcatcatcccaagtacacgggttacctaactgagccgggtaactatgacacgccaatgaccagaagaaatcaccttcgctttcactgaactgattcataaagtcgagcatatctcttactttataccaaccgccaccggcagcgatattccatccatgcgagaaagagataaagacttctgagtgctggtcatattgatgcgcaatattatagcacatacgcatcgaacggagataagtatccataaacgtggcaatcggtttgtcacccatattggtccaatgacttcctccatccacttcgttatgtataatccagtgcgctatgcgcatattagggtcactatatctttctgccaggaagtcaagtgctgcagcgtaacaatttgtagactctattgtggtcatattgggcattgtataaggagctataccattaaaatccggatgtttcaaaagagtaccggcatctccggtaggaggaaccagcaaaatacctgctacagagattccacgtttactcgtttgctccaacacagcatcaaatgaactcttcatatatccctcattaaaataatatgtcctgccaccgtaagtatgcggaatatctccttcctgttgagaaagatgcatgaaatgagaaataggaatgttgatggtggcactggcaatacccaaatcatccaaatcagatgcaaggaatccatggtttatcaatcctcccaaccccttcttagattttaaaggaatagcctcaacactttgttttacgtgtattttatccacgttcgcatagcgggcatgagaaacaatctcatccttggaagctccttctttgtatatagcccacttagacaataaacgatcatacttatagtcacctatagtaacatatctatccaactgaacgttaaaagagccgtttgataaaggtgttttattttccaccttttccactttgaacatatccacaaatggtggaatctctcccaagaagaaagtaccttctcccgtatagttaccttgaatactgatcgtactctctcctaccaccacatcagttacatggcaatcatattctttattcagataatctttaattccttgttcgtacttctctttattaagtgcttcattattctcgtcctcttccgcctgtttttcctcatcattcatcatacgtaggcgtatattacgcatttgtatgatattattaggctggtctccaaaatccagacgcagaaaatctttcacttttccccaatcaaactcctgtctatatttctttagacgaacgctgaatgaagcccattccgtagaagcaggaacggttcccgcactcatgctatgagtagcatcaatcccattttttgcatcagcaaaaaagagttcaaggttactcatccccatttccgtctgatattcaaattcaagaacattacattcttcgggaacatcttctttaaacaaaccggcagtcgcccaaggatcaccattagtagtttctatcgtataactactgtcttcattctgagttaacgttactcccgacttatagggcccatccaataacatataaacaggcgggataacaatatcctcaggaggaataacttctcccccatcatcttcaataaagtcatcattacaggaagacaagttcatcacaaaaaatgccattaaaaacaacatgccacatcgccctagcaggcgttcaggccttctcgtaaagaaaactttcaaattttccataatttcagttttagttaataatgtcgttgattaaaaattctcaataatattccaatcaggaattccaattaaaggtaagaattgttcgaagtattcatcttcttcatttgtgcctgcttttcgataaacttcccacacaggtttggcttcccctctgtaagattcatccaagtatttacgcaatccgaagcaagctccgtctcccggatgatcaaaccaattatgccattgtagcccatcaatcccttccaatgcattgattttcttccaggcgaaagccaaactagccgcttgcttctgaaaatcttcatccgaataagtaggagaatttactccagcctcagaaagccagacagagcgcttaatagtccctttatatttattttctttggtaagcgcccacttactcagaacttccagattcttaaacgtaataaattgggtatccatggaaaacgttgcgttcggatcaatccaaacacatggattcgtcaaatcctgagaatagctatgataagctaatccccactgaaagtccccttctacccgactataaacattcaacaaatcaatgatttccttgcttgtatagagccaccatcccacattcgctatctgtgtccaggaatgtgtaaaggagcccaaaacctctgcctgcttatcatattggcgtactatattataacatatacgcattgattttatataggtgtccgtaaatacagtaagaggttttactcccatatttgtccagtctatacagccgtctacctcattatgcataatccaatgagctatacgcccgtagcgattgtccgccgtacaatatcttttcgccagaaaatcaaatgccgccgcataacaattcaccgattccagagtagtcatattaggcattgtataaacccctctttcataatccggatgttgcaacaatgcccccaagtcagggtctacacatttagctgccggttcgacaagaatgatggcagcaacagcaatattccgtttggctgcttctaaaagaggaacgtcaagcacagtcttgaggtaaccttcatccatataataggttcttcccccataagtatgcgcaatatctcccgctcttggcgtcagatgcataaactgagtgatacaaacattaatcgtagcactgcttatccccaacgaagtaaaatccgatatatattggttaggaataattccacccaaccctttctttgaagtcagtttgatagccggaagattctgaaacgcatgaatttcatccgcttgatgcgcatgagaaaccagttggtctctttctactccctctttataaatagcccactttgacaaaagacggtcatataacgctccatccctttctacatagcgctctaacttaatttcaaaagatgaatcttctaacttcaacttataaggagccttcttcacatctatgatatccaaataaggaggaatctcacctaaaaagaagttgccttcaccggtatattcaccagtaacgcaaacggaagattccattactgagacctgagaaattttacacgaatagctttttcccaaataagcattcagatcttgttcgtgttgaatatcttcttcgtcaaaaggagattcaggtatctcctctttctcttcctcgtgacaggaagaaacaatgaaaggacaataggacagaaacaaaagaataataaacgactcaatataagcctttctcattttaaaaaaatgacttttcaatagctccataagtaaactgtaaaagggtttaggtttaattatacaaatatagagctattaatatgaacacatgcaaaatcctacttctttttacaatttttatacacagcaaaaaatattactaccgaaaaacatcttaactgacaatcatctattatcacaaatgaatactaatcaatcagcaaagctttcatcggctttttgtctcccatataatagacggaaatacaaaaagcttcccaatccgcataccctccgaatcgccagacataagaatcgacccaacagggaaactcttcgtatctgaaagaaacaacaccgtcttctgagtggagataagtggtcactatatcctgaaattgcgcatgagaacgttttgcgcatggaatgacaaatgccatatgcaaaacgatcgcacttgctgccacaattgatacacttctacaccaaaccgcattaaatgaagtctgttcactgatcagcttgattaaaatcacaacagaaaacaactctattccaaacaattgccggacatttcgaaatcctataaccaagctaaaaacaagttcaattaagattacataaaaataaagttgattatcatagaaaaactttctcagggtatgattattgttgtttctcttttcacgaaaaaaagtatataccagcaaaaacagaagaacataaaatgcccgaagctcaccgattatcaataagaaggtttcccagatggaaggatgatcaaacgacgcgcgcccgcgggcagcaggcgataaacacaacaacaaggtcccaagccaaaagccggcaaccaaagctatttcaggtgatttaggcttcctcttattatattgtacacaataaataataaacaaagccccggaaatgcctataaccaaagattcatgtgtccaaccagaaatgacgcccagcaaaaaaagaagaaaagcaactccccaattcaccctttccatttgccgcactttagtataaacaagcagaaaagccaaacaaagaacggcgctccaagtataattgagagcaccactcatcagtaaaaagagatcaaccgggcaaggcaataagaaccatataaagaaaactgcagcaacccagtaaccgaattttgtcagatttctttttccggaaatccatataaccaacatattaagtaacagaaaagcgaatacattgattaaattaaaacaattctccccccaaagtccggcaaacgactgctccagaatatgaggaatggtacggccattcacataaaaataatgattatattgcgaaaaaataacatcggtaaatgatgatatcttctgctcaaatcctatcgatgcgccttcaaagaaagacttagctgccacaggagtcaaatagaatgaataaagataatcatctccacatatcggagtgtacatattcatcaggtaaaataaacttcctattatcaacagaaatgcgccaataccaatccgaaccgtttttttactcataatcttagttattgtttcacaccattatattctcttgcaatgtaggtaggacgattctttgtttcattgaaaatacgtcctatatactcccctatgactcccaaggacagcaattgtataccacctaagaaaagaatcacgaccatcagagtagggaaaccctgtactacttcgccccatatcaatgttttaaacatgatgaagcacatatatatgaaagcaaccagggaaactataattccagcaaaagtagaaatgcgtaaaggagctacagtaaaggaagtcaccccttccacagccaagctcagaaggctgaaaaagttaaacgaagatgtaccggcaacacgatcttcctgctcgaatttgatctctttcttacgaaatccaatccagcaatacatacctttagtatatctttggctctcacgcatctgtttcaaagcgtttacacaacaacgatctaacagtctgaaatcaccgacattcgggagaatctccacacgggtcgttttctgcaataacttatagaataacaaggacagatatttacgcatcaaactctccttgcctctggttattcgctttgcgtatacatcatcatacccttcttcccaatatttcaacatttcagggattaagtgaggaggatgttgcaagtcagcatccataatcaccagacaatcgcccgtagcataatcgaaaccagctaacattgctacttcttttccaaaattgcgcgacaggtcgacaaaattaattctctcgtcttgtgatctcaaaaatttaataacttccaatgttttatcatggctgccatcattaacaaacaaaatctcccactcatattctgcataagaatccatcatttcttttagcttcgaatagagctccggaagagagagttcctcgttgtatgcaggtattaaaacactaactttactcatatttttttagattttagaacaaaacgaacaagaaggaaattaaccggtactactaatgcaaacacaggaagaggtgcccatctctcgggaactccgatccatataaatagcgacaacagcccgatatgcaacaaataattgataaaatgactgatgccaaatcctattcctttcctaacagtaggcttagtattaaaggtgaatatattagacaagtaaaaattcagaataaagctaatagcataaccaatagtatatgcaatagctggtaacatcaatacacataaaaagaaataaataccataatgagtagcagttgccagaacaccaaccaatatgaaacgaacaaactctctacgcttattaaaaacagacatcatccaatactcttttattgattttgatccaactacctacaggagacttataaaacggtacaatattataaataatatataagaccagcaaaaaagtataactaaatatacaaaaataaataatatcacttctccattagattaaatcatagaatgatatctaaggtgcaatttctctactcatcttcatgagttaccaccacacatcactttatacattcaagaaaaaagctcccttattttgatcacaacatccatattctgcgaatcaaattttcgagcaaacaaatgctctgtttctaataaatattgcaaatcctccattttccaaacataaggattcccccgttcccaatcaattgcacgaagtccggcattcaactgctcactacctggataaatatgactccgcctttctgagttccacaatatagattgaagaaatatttcgtcaccacagcaaacatttttaaaacgccttaaaataaaagacttttgggctaatataattgttagcaactcatgcgtaatactaacccaattggaaccctttttaaattcaatttctttaggtcggttataatggaagaaatcctgcaactttaaaaagcttattcgaagagattgtacttgctttttaaaaatacgaggtggaattttataataacgacagaacaaatgatatttaaaaacctttctttcgagatcttttaaattagcctcaccacaagagtaaggcacaaactcataccccttatttttctcgaagaaatgatggatatagtcttgtgactttatcggcaaatcgactcctgacaacaaatgataataatcataaggacctttcatactggctgtctcaagtaacaacagttcagcctttaccacactaatatcaccccatcttacgtcaagacgttgctcaagtacaaaaagacgagcttttgcaagccgaaataaatcttgctctaaaggtccgagcacgactttcttatcaatatgcagatatatatcattcctcccatcatcaagcatagaaagtagtatcttcaatatttgaaattcattatgggccagaattaaaaaagcatgtctcattacctttgcatcattaaataagttcattatcatgcaaagatacaacagatagaattccaatacaacaatagttagataaattccaaacatatattttgataagtattggaatctatctatctttgtgaaatttaagtcttaaatcattaaattggagctgacacccgattcttaatggagacaaagacaataacgtcattaacctaaacaactattatatagaccaataatatccataattacaatgatagataaacctatatatgtgacttcccccctactgccttctttggaagattttactttcttattaaaagaaatatgggaaagcaaaatgctgacaaataatggcaacttccaccaaaagctagaagaggaattagctaagtatcttaaagttccctatctcagtttgtttacgaacggaactctacctttaataaccgctttacaagcaatgagaattaccggtgaagtgataactactccctttagctttgtagcaacaacacattctctttggtggaatggaatcaaacctgtttttgtagacattgagccagaaacctgtaatctggatcctagtaaaatagaagcggccattacccccaggactacagctatcatgcctgtacacgtttacgggaagccttgtaaaacgaaagagattcaagaaattgccaataaatatggattaaaagtcatatatgatgccgctcatgcttttggagtagaaataaacggggaaagcattttaaactttggagatatggctactctgagttttcatgcaacgaaagtttacaatactttggaaggtggagcattagtcgttcatgacgagcagactaaaaagcgcatcgactatctaaagaactttggttttgccagtgaaactgaagttgtagcccccggtattaatagtaaagtagatgaagtacgcgctgcatacggattacttaaccttaaacaagtagatcatgcaatcaattcccgtcgcaaagtagccataagatatagagatgaacttcaaggtgttaaagggataacctttttcaatgatataccaggagtacgccacaattattcttatttcccaattttcataaatgctgaagaatatggaatgacgcgtgatgaactttattttaagatgaaagaacataatgtattcggacgccgttatttctatccgctaatcagtacattctcaacatatcgcggattagattctgctaaccctgacaatctgccagtagcaacccaaatgtccaataacgtcatctgcttgccaatgcaccatgctttaagtgaaaatgaagtcgagtatatcctccaaattataaagaaatagtatgatacaattatcagaaataacaaactctatatccccttccttaacaaggcgtctatttaacttggcccaaaaatatgacaatgttatagacttcacattgggagacccggatatacatccacacgataaaataaaagaagctggctgtaaagcgatactggaaggtcgtacaagatactcccctaatgccggattattagaattaagagaaataatatcttccagatacaagttacaatataatatagaatacaacccgacaaatgagattatggttacagttgggggaatggaaggattatatttaaccctgctagccattctaaacagaggggatgaagtcattataccagctccatattggataaactatgtacagatggtatgtatgtgtagtggagagcccattataacagctcctgtcagcaccaatgacttatcaatatctatagaaaatataaggaaggcaatcactcctaaaacaaaagctattattttaaatacgcccagcaacccttccgggcggataatttctgatgactccatccaacaaatagcacagatagctattgagaatgatttgatagtaataacagatgaggtatacaaaacactactttatgataatgctcatttcaaaagtattgttacatgcgacacgatgaaggaacgcactgttgttatcaatagtttatcaaaagaattctgtatgaccggatggcgtttgggttatgtagctgcaccttcagaattaatatcagtgatgacaatgtttcaagagaacatagctgcttgtgctccattgccgtctcagtatgcagcaatagaagcactaagaaattcggagaaatattcggctggtatgattgaggaattcactctccgccgaaatgttttattggaagaagttgccaaaatcaaaacaataacagtcgatgcgccacaaggaaccttttatgcaatgttaaatataaaatctaccggattaaaatctgaggagttcgcatatgcccttttagaaaaagaacaagtggcagtggttcctggaataacttacggtgattgttgcgaggattttatccggattgcttttacattagatatatataaaattaaagaaggaattcaaagacttaagcgatttgtcgaaagtttataagatgaaaaaagttttaatgctaggaggctctttatatcaggtctatgcgattaaagaagctgtaaaaatgggatattatgtaatcacctgcgattacttgccgaataacccaggacatcagtatgcccacgaatattataatgtcagcacaacagataaggaagctgtttacgagttagccaaaagacttcaagtagatggcgtcgttgcatatgcttcagatcctgcagctcctacagctgcttatgtttgtgagaaactaggattgcccaccagcccctatacttctgtagaaattctttctcagaaagacttattcagacgatatctggctgaacataatttcaatgttcccaaatacgtcggatgttcttcatacacggaggctttggaacaaatcaagaatttaacccttcctgttatgataaagcctgtcgattcatcaggaagtaaaggcatcaataaactgactaacgtagatcaactaaaagactttatagaagatgccctctcatattcccgtgaaaaacgcattattattgaggaattcatagagaaggacggatatcagatatcaggagatgccttttccgtagacggaattttaaaattccactgttttggaaacgaatactacagttcttcagttgtcaaagatttcgccccacttggtgaatgctggcctttccaaatgaaacctgaaattataacagaactggaaaaggacatacagcgtctgatttctgaactaaaaatggggacaaccgcatataatgtcgaggctattcttggtaaaaacgggaaattgtatatactggagttaggtgccagaagcggtggcagtttaatacctcagattacagaactggcaacaggagtcaacatggttaaatatgtgataaaagcagctttgggagaagattgctccgaaatagagatgtcacctgcaaggggatattggtctaattatatgttacatagcaaacagaccggacggtttaaagaaatatcatttgatgaaaactttgcaaaaaacaatctggtagattgtgtaacagaactgaaaagtggagataatgttcatgctttccgtgatgctggcgatgcattggggacacttatcctcaaatattcttcgaaagaagaaatgtttaatgttatagaaaacatggaccagtttgtacatattattattgattaaaatatgagcataacaatccatacagaacctctagcatataccgaattcagggattttatcatatcctctgcaaactggtttgttccttctctgttacagatgcccaacctggatgaatggatattaaaaatgtaccataacggctctatgtactatactatttccggatctaacattatatctttaattgttggctattacaatagagaagagagatttttatatataccctatgtctgtgtaaaccctgaccatcaaggtcatgggatctctaaaaaaacaattaattatatcatagaacatctttctacggacattcaggagatattgcttgaagttagaaaagacaataacaatgcacttcatgcatatcataaaatgggattttatgaggctgaggatagggatgagaagtatttaatgaagaaagaggtacacaaaagttaatattgaatgaaagatatagcaaatactccattagtaagtataatttgtagcacatataatcatggattatatatatcccagtgtctagatggttttctaatgcaaaagaccaattttccatttgaaattctaatccatgatgatgcatccactgataatactcctgatatcattcgcgagtacgagcataatcaccctcaagtcataagacccatatatcagaaagaaaacaaatactcaaagaaagaagatatctttgccaaataccaatgctcacgagtcagaggaaagtatattgcaatatgcgaaggagacgattattggattgacccattaaaacttcagaaacaaatcgattttctagaaaacaatcctgattacggcatgatatatactaccagcaaggtatataaccaaaagaaaggcaaaatagaagaagatattattggacggaaatttaatggttatatagagttattatccggaaattgtattccaacccttacatcttgcatacgcagtgccttagtaatggagtacttgaaagaagtggaacccaagagcaaaaactggctaatgggagactatcctatgtggctatggatatcatattatcacaaaataaagtttcttccagaaagcactacggtataccgtgtcttagaagaatcagcaagtcattctaatgatatacagaaatatgaaagattcatattatcgaccattgatataactgcattttatatccacaaatttaatactccattaacagagccatacttacgatccttaagttgcttttactatgatctatacgataagtatatgtgtctgggcatgtataaaaaggccagacactattcaaaactcattaatcctagttatgtatccgcacgtatgcggagaagagtccgccgattccatctcagattcattcagataagattagcaaaatggttcgatataaaaggaaaagaaaggaagtaaaaagggaaaaaaactatctagtgagatattaagtaaatatccctttttctattcacgaatctccaccttttttaaacaggaaatgagtcaagtagtacaaatgccaatgataagctatttttcttaccctcctgcgatatttcaattcatatgtatcttcaggcaatgcagctatctctttcattttctgcctcatatccttaacaggttctttgaattctctcaaattcaccttcaaaagtatctccttaaatattgtaagacaagtcccaatcaacctagtcctaattttaaaaagatcttcttcttcaaatagagagtatttctccatgaatctcatgcgggcatattctgccaaaaaataatgataaagattcataggagacattgtatgacagatactcgtttgtcgctctacataatgataaaaagggctatctacccatacaactttcttacatagagcaacccattcatacattacaagtctgtcttcataatttttcccctctgggaattgtaatgatgtcagaaagccactcttataaagctttgtacaagcagaacaactaactttttccatcatcatatcttgtaatacattctttggatctcgaataacaatatctccagaattccggtaaggagactcgtttggtttaaattcatattcaagaagaaaattacaatatgcaatttccgcatcactttgtaccattgcatctaacattttctcaaacattgcaggttcaacatagtcgtcactgtcaacaaaaccaatgtaaggagcagaagctatacgcatgccagcattacgagcaatagagagtccagctatagaaagatgaagcactttaatacgtttatcaattttcgcatattcatcacatatctcagaagaaccatcaacagataaattatcaaccaagattatttcaatctgctgtaatgtctgactacgtaatgattcaatacatttatgcaaataatcagcggtattatgaacaggcactattatactaaccaaatacttattctccactatttatctttttaagtttaaaatgtatccaataataaataggccaaaaataaacaatctttctcagccgtttataacatttaatatcaagttcctttttagacagaggaattaatttcttcaaattattcttcatatcaacaacataggcacgactttcgctaacaggaaaagaacgcatctctttaaaagtccttaagcagctcttaacaagggatgttttcatattatattgttcttccgtatcgaacaatagattattattaataaactccaagcggcaaaattgcgctaaaaagaaatgataacgttgtaatggtgaaataacatggcaaatactagagcttctttttacataatgataaaatgccttatcaatccacactactttttcagactctaatatccactgatgcaagataagacgatcctcatacatattatgtataggaaattttaatgaagaaaaaagtgtcttcttaaagagtttcgtacaacaagagctattcaatcgatcacacatcatatcatacaccacctccttcgaagatctttcacagaccataccactattaggttcaaaagagtctatatgcccgtcgtcatgttcaatctgaaaattggaatataccaaatcaacaccatatgaactaattgcagcaagcaattcctcatacatattgacgtcaatataatcatcactgtctataaaccctatatatggagcagaagccatatcaatgccagcattacgagctacagatgcattagctatcgaaagatggattacttttacccgagtatccatacttgcatattcatcacatacctcagaagatccatcagttgataaattatctaccagaattatctctatattttctaaagactgattccgtatagattcaatacattttcgcaaataattaactgtattatgtacaggtacaatcacacttatcaaataattattctccatgcatgctctccattaataaacttacgcacaaagatagagaatatagtattatcagtaaaataaaaaccagattttaagttcccaggttatcattaataatcgtatctttgccggaaagcttattatattaatatgagtaaggaaaatatagcatttgttgttgtacgttacggattaaatatcaatggaggagcagagtatcattgtagaatgctagccgaaagactcaccaatgattataacgttgaagttctaactacttgtgtagataattatagaactggagaaaatcttaagtttaaggaaaaagagattatcaataaagtcattgttcgccgttttaaaactaatcccactcatcctgaacttgaaaacttttataaaaagaaagctaaaccggcttataaattaagacgttttttatacaaatgccactttctagctattgcttcttactttttccctgtttggcatttcaaagaaaaagaagaactagaagcactcggtagccaagttttccattctccggctctcttcaatttcgtaaaagaaaataaagataattacaaagcaatcatccctattacaatagattattctcatgtatattacacaactttatatgcaccagaaaagactattgtaatccctacaatgcattatcacaaaactgcatttcgctcaaccttgacacaagtctttacaaaggcagcctacatcgctttcaacacaacagcagaacaaaaactagcaagaaaaatatttggtatgcacatggcaccccacagtattgtaagcgtagggatagagctaagtgctccatcagactgggcagtgacccaagaaaagtataatcttcctgatgaatatatgctctatgtagggagagtagaccaaggcaaacttaacaatgtgtatacttatttcctcaactataaaaaggtatatcctaattctgatttaaagtttgttcttgtaggcaaacaatatagtgatccttttaatcatccggatattatatatactaattttgttgaagaacaagaaaaaacatcaatcattcaacatgcaaagattgtaatcaacccatcactgtatgaaagcctatcacttatattactggaagcaatggctttaaaaaaagcgatgctggtcaatggcaattgtaatgtattgaaagaacattgccataaaagtaataatgctgctttatactacactaatgaaaaaagtttcattgataagcttcatatgctagattcttctaccaatcttagattagagatgggagaaaaaggatattcttatgttaacagtaattacgactggaacataataatgaataaactaaagcatgttatcgaaaatatataaagatttagatactcttgagagcttgctttaagcgccccataatcaaagtccaatcatagttcgatttcacataaaatacacctttctctcccatctcctctctcaaatcttccgattgttcaatccgtcgaagtgccttattaaacccgcgattattcatgtaataaaaagaagcaaaatcactttttaaacaatgttctttcaagaccttacaatgtccgtttacaagcattggcctcttttgactcatagcctctaaaagtattaaagaaaggctttcataacgagaaggatttactacaatttcggcatgctgtagaattgacattttctcttcatcactgacaaagcctgtgtatataacatcaggatgctcaaatcgctccatagccagcccacctaccaatactaatcttaatgttgaatctgaatatttcttcttataattcacaaaatatgtaagtaaacgatgaatctttttaggagtaatacgaccaatatataacaaatatttctctggtaattgaaacttctcttttgtcatcgcccaatctgcggataaagactcctctattcctacactcaatatcccatgagcccccaaagccttacccagaatattttcagcaagcctctgttcctctccggtattaaaaccaacataagctatatttgaaaaagcagatgttaatacagaacggaaagaaatacccatattatgcattgtaggaatagctattgtttttctacctgcatacaatgcagtgtaataaaaggtgacataatcagaagacattgctataaatgctttatattcatctatatgatcacgaatataatcattcaatgcggacgaatagaatttatcactcttcatcgcctgtacctcatcatcatgtttgtaagaccatacaggaatcaaataagacaagtatttcaagattcctaatttaaaaaggaactggcgtagttttcttgctggtttagccttctttgcgaaatagcgttccttttcacgctgaacaggattcgtcctaaaacgacgaatcaccactccattccattcttcctcaccttccggatatatattttcacctgtcgcaacatctctgacacaggtagtaagtacttccacatcataatcagatactaaccgttctgctaacatctgacaatgatattcagccccgccatttatatttttgccatatctgacaacaacaaaagcaactttctctttcctcatagcttcccttaatacaacattctacttatgagagcatctgaatcacatttttcatccgtcctataatcatctcccaattataattctcctgaacatagtgacgccctttctctcccatctgttgacgtaatgtttctgagttctcaaggtgatgcaattttcgcataaaatctctacgattcatataatacaaagctgcataattgctcttttcacaatgttctctcaacacattacacctgccattgaccaacatcgccttaccttcgctcatcgtttcaagtaaaataagtgataaactttcatatctggaaggattcactattactttagcattcaactgaatcgctactttctccgcatcatcaacaaaacctgtgtaaattatatccggatgttcgactgtctttccaaaaatacctccgactaaaactagctttaatcgagaacctgtatatttctttttatagcttaaaaagtaatcaactatattattcaactttatagcatcaattctccctacatacaatagataatcttccggcaaattatattttacctttgttcgctcccaatcagcagcttttgtcttctctatacctacacttataatgccgtgagcagccaaaggctttccaactatattctctaccaatttctgttctgcttctatattaaatccaatataggcaacctcagagaaaacagaagtaataatagaacgaaaggatgaaccgttattatgcatagtaggaatcagaatcgtcttctccggtgcatatagtgcagtataataagtatgagggaaaaaggaaagtgggatgaatgctctataagaagctttattctctcttataaaagcatacattgaagatgaataaaaaacctgactattcaaggcctttatttcttcttgttctttataatgccaaatcggtttcacataagacaaaggcttcaaaagacgacatctgtacaagaagtgcctccacttctttgccggagccgcctgcctgacatagctcttatgtaagtccggttcaacaggatctgaatagaatcgacgtaccaaaactccattcaggatttcttctccttcaggatattcattatcaccggtaacataattcttgacacacgtagtcaatacttcaacatcataatcgttaaccagcctttcggccagcatacgacaatgatattcagcacctccgtttatatcttttccataacgaactactataaaagctatcttttccttagtcattctagtcaatcaacaatttgtgctttctcttaaatatagcacgataaccacgatatagcatcctataaaaaccgaagtgtttacacataaaatatcgtttgattgacatactcgggcctagttgccaaggagtaatatgacgatattcacgcattttcaacatcgtttcatctatgatatcctcaaaagccggtgacggaggacacaataaagtatggttaatcagatgaatacctctcttaagtacaccaacggaagattcttctccaagttccgcattctgaataaacttatcctgttcataaagactcaggaagtaatgatattcctttaccggatcataaccaccacgagtaatgctttcattcttatgaatcatataatggtatttagagacacaactcaataccactttctgagagctataaaatactttatataatacagctacgtcctcataaacccgtccgacagggaatgaaaggcggtcaaacaatttacgtttaaagagcttcgcccataaatagttctttaccaagtcattctttaccaaagcacgtataatctcctttctggagaaaacatacaacttacccgtgttgttgattattttagaaggtcttccctcctgctcaagaagataagtacaagcagaaacatctgcatcatgctcttgcatcaaagcgtaaagatactgatacatatcatgatcaatccagtcatcactgtcaacaaagcccaagagctctcccgtagctgcagccaaaccggcattacgggcagcactcaccccactatgaggcaaatgaatagtcttaatgcgctgatccatacgcgcatactcatcgcagataccggaagagccgtcgtcagaaccatcatcaactaagataatctcaaggttcttataggtctgctccagtatagattgcagacaagtcttcaaatagtcctttacattataaacaggcactataagactaatcaatggtccagagatattagtattcatattattctacttgtcaactttttatttttactgcagccccttctatatagaatgctatataacaaggaatactgcaaaactaccctcgattttaaataaatttcacacttgtctgtgattcgataatacaatctaaacactctcaaatcaaacaattacctcttatttgccatttatacagtataattcgtctagtttccaaagttcattcaaagatttccactgtttatcattcaggttagttttcccattatttttcttttgtaagctattattctgcgtttgaggcagctctatcggccggggatagaattcaccccctcctgtcacctcgacccgcctctttaattcattcgctttcaaccataaatcatccgcagacggacaatgttcactgattattttccagtcaaacaactcctctccataccaatggggaggataataaatcccgccacatccgattgccacattctgcaaagaactattcaccggcatcgtaaacactttcgtccactttctatataccgaaaaagaatttccatccatatgaatcttccggataacgtttccgcaaaccgtatccggatactgatacgataaggaaagcaaacgctcaaccgtattccggggataaatcagatcatcatccactgttatcactttactatccggatattcacggaaaacataatgatacttcttatgtgaacggaaattctcagacacaaatctgaattctattcctttagccatcaatattttaagttcttctggcagatcattcaaccgtccggggaactcctgttccgacaaccatacaattatcttttcgggcggacaagtctgccacagaatcgatttcaacatcagatgaagctgagaaatacggggaggaaatgtcgtcaacgagacaatgactcccgaatggttcgataatgccggagcatcagtgtcctgctgataagcacgcaccactttatcatgatactttgctcttctccacctgcaagacaaagaatagatatgtcggtaaaatcctcctttttccttataggaagtcagcttctcttcttcccgtgtatagcgatcataataactgttcaccttcacagactgacctctcagttcatcctttacaatgcccagagaagtccattgaacctttgctccacgagtatgctttcgtatgttccggttcttctggatagagtctttcgtcttataccctcttgcatgatccaaatggaggcatacggtagagtaacgtatctgcataccatgaattccatagttctccagacgttctccaaattcacggtcttgtccaccgtactgcatacgctcgtcaaaaccattcacagccagaatatcgcttagccaaccggaagcgttatgcccattccagcttgctttggtaggagtaaaggtatttaatgcccaccttttaaatcctgtagcagtcagtttattatttttaaaagaggcaggcatcccttttcctctcatccattgcagatcaaaacatctgccggataatatatcgtcctttgtaatatctttcgacaaatccatactcaacttatgatatccgccggacaggaaacgtcctttacggcgaagacacaggtgagttgagacgaagtctttacgtggaatacaatcgccatcactgaaaagcaggtaatctgcttgtgcagccagtatgcctttattcagaatatcacatttacggaatcctttatcttcgtgccatacatgcttcacctgaaaggacaattgcggagttatcctctgcaacatatcataagtttctttccgcgaaccatcatcggcaataatcaattcaaagttcttagtatcctgggcttcatatccccacaacaccttctccagccattcaagctggttgcaggttgacagtacgaccgacatctgcaaagaagtagtcttccgactaaaacagataatagaataattgcactccatctgtccctcagcccaataaagttctctcgaaatctccctccatccgactaagtccacacgatcagtgccatcaatgtcttcctccttatgcaaacgaaccagacataatgcgtcctcatcctgatcttctttcaagtcagcatgatgagccagcaagtagtcccgcactttttcatccgaacaaacaacattattttcaaaagctactatcattaattaccctcctttagccattaaatatccaactgaaaccagacctgatgtctgcgacgatatctgttccagaatttctttctgtaatgcagaaccaaacgcacacattcctcttcgtccatccctctcgaacgggcatactcttttcccaacaagatgaagaagggtgtctgcccccataaacgggcaaaattcgcacaacctttcttaatatccacttcgccaaaatgcattctgttaatatccaccagtgagaaatgatattcttctcctatcttgtcatacaggatgtttcccggcgaatagtccagatgcagaattccggcttcatgcaaacgcgctgtaaattccgcaaaagcggtcactacatcttcgcagctttttatatccgcattgccaaactggcaaaaattatatcgatagggagattgtatgctcataaaatatgaatgaccaatcaaacccatttttgtctcttctatataggcaataggacatggggtttcaaaccctttctccaacagtttctccggataaacaaaagcccgtttccctttcgaagggcgaaagaaagcataagcgatccgatttatcagtggaggtatcgtataccgtttcacgttaatatccaatccatccaccgtgatcatctttatcaaatttcgcccggaatgaattaccgttcctattgtctcaaaatctttcggaatacgttctacatattctctcagatattcgtatttggggttaatcattattttcatcttacgaaaaaacaagaatggtcatacttctcttcatctctcaactcttttgcccggtcatcttaaaatatttatccaacacaagcagtgatatcaaattttctcttctcttatctttaaactgggacacatattcatgggcatgtctgatgatctccaatgattcgtctacatgctctatatagtaattcaaccgttcctccagatcagaaaaatccggttttatttcaatataatgataattgggaataagcgtgccttccataaaccatgtctcacaggtaggccggggcatcactgctattgaatttgatgacatcacccatttcaggttgctggccacatcgattccttcaagagccattatgaatttataatccaaatgctcattaatcgttttcttctccgtgcgccactctgccggatcagtcgtatttttgctgacatcgcccaaatcgcacatcggatgatgaaaatacatttccataaaaagctttctggaaggttttccttttacctttccacgaaagattaccatatttttcttctcagtaaaagccttcttatcctccacaaatataaaatgacgaaccttatccagtttcatcacaatcgaattcgcattatcatctgtcagcggacggcttttcacaatagagggatagtcgggaacaaatgtcacatcaccgggacaaaagccccactgaaactgatcagaaaaccagcgggtatattgataagtatcaaagaaatacactttttgtttgctcatcttgtgctctgaaagatgcggagcagaagaaggtaattgcaccgttccggaaagtttgttataatagtcaacgcgacgttctatataatccttgtccttccggcgggatagtgaagacaactttccttgtaaccgtagccggaaaatgcctttcggaatgaccagtctgagagcatttaccgagtagtaaatgaacttaggattcttcccgctacgcaacttatataaaagtttattcttcattcttgttccatatctcaggagtacctggctcctaattgattattccttcaatcttcgctatcacctgttcgggttttatttctctcaggcaggcataatcgccccgccagcatggtttctgtccgtatacggagcagggacggcatgacaggtcaagctgtaccgtattgaccggcaactgtttccatcccataaacccggcataaggatgagtagctccccaaacagagatcaccggaatgttgaccagcgaagccagatgcatattcgccgaatccatcgagagcatcacatccagatgactcattagattcagttcggtacgcatattcaacttaccaatcatagaaacgacggtaggatatttcgccacccagccatcgaatacttcctgttcactcttgccacctccgaaaaggaaaaccttcaccttcggatcggtggcaaaatgggctactacctgctcctgcaattcaatagggtatatcttacccatgtgcttggcaaaaggagctataccaatccatttcaaattatcttttgcgcctgtgacaggttctatctctgcaaagtttcctttttcatctccataaatcgaagaaaaattcaacaatacaggaaaacccagtttctccagcacatcggcataacgacggaaagaacttttctggttctccaatactttatgccggcggcggactaatttttcttttcccactctacctttatagatagatgccacaggtatattagccagccggaacctcagacacaagtatttcgtacgaagtacatgatgaaaatctgccacatagtcgaaacactttgctttcagttccgaataaagggtgttcaacccccataatcctttatgtttacccgtcaggtcagcaccgataaaactcacatttgcaggaagtccctgaaaaagcggttgccacacagcacggctcaacacagtaatttcaagttgaggatattgtactgccagcgaatgtactaccggtatcgtcatggctacatcgccaagagccgagaaacggataatgagaatacgcgccattcgttatttttttgcataaagcaccggattcagcgccgggtcattatacatcttcatctgtttatatactttcatatacttcttccctgcttcgatgtcagccagcagctgatcgatagccgaagaaaggtctttctgttgttccagcagaatatccagttttacctggcattgtgcacgatgttcttccgtcgtatccgtacgttccacttcttgctgcatgtggtaaattttcaaagcaagaatagagagacggtctactgcccaggcaggactttccgtattgatggtagcatctgccagcggctttacatccttatatcgatcaagaaaatagctatcgatcaattccaccagatccgtacggtcctgattggatttatcgattcttctctttaaagctacggctgccaccggatcaatatgcgggtcacggatgatatcttcgaaatgccattgtacggcatcaatccagtttttcagatacaaataatactctatcgacttcaactcgtaaggattgttcatcggcgcatctacgctgtccgtcacatggtaatctgtcgtcgatttccaaaaaatatcattgcaaaggttactaaatgtcataatcttaactagctaatagatgtataataggacaaagctatgtaatatttttcagacaagcaaccgtttcttacttttttatttcttacctttgtctgagtaaaaaaggaattgtatatgaaaattattatagatgataagataccttatataaaagaggcagcagagaaaattgccgaagaggtaatctacgcaccgggaaaggattttacacggaaactggtacaggatgcggacgcgctcatcatccggacccgcactcactgcaaccgcgaattgctggaaggcagcaaagtaaaatttatcgccacagcaaccatcggatttgaccatatcgacaccgaatactgtaagcaggcgggtatcgagtgggcaaatgccccaggatgcaattccgcctcggtggctcagtatatacaatcctctcttctgatctggaaatctcttcggaataaaaagccggacgaactgacgatcggcattatcggtgtaggtaatgtaggaagcaaggtggccaaagtcgcacaagatttcggtatgcgtgtactactgaacgacttgccaagagaagagaaagaaggaaacatcgccttcacctcactagagaaaatagccgaagaatgtgatatcatcacctttcacgtacctttatataaggaagggaaatataaaacataccatctggcagacgggaatttcttccggtctctccaacgaaggcctgttgtcatcaacacttcaagaggagaagtgatcgaaacaaacgccctgctggaagccatcaacaacggtacaatctcggacgcaataatcgacgtatgggaacatgaaccggaaattaaccgtgaattattagaaaaggtactgataggcaccccgcatatcgccggatactccgccgacggaaaagcaaatgccacccgaatgtcgctggactccatctgccgtttcttccacctaggcgcaacttatgaaatcaccccgcccgccccatcttcgtctcttatcgaagcaaaagaccatgaagaagctctgctgaaaatgtacaatcccatcgaagacagcaaccgattaaaatcccatccggaactattcgaaaccttacggggagattacccgttgaggagagaagcgaaggcgtatatgcaggtaataagtaataggtaataagtaatagccatgcggatatctagcgaacgggcacagtaccaaagtaactacgattattacttattacctattacttcttctacaacatgtgggaaatgctcatactccaaagcgtgtacttttttagccacctcttcgggtgagtcatcgggaagtacggggcaggtggcttggaagatgatgcttccttcgtcgtagtgctcattaatataatgtatagtaatgccagtttctttttcgcccgcagccactacggcttggtgaactttgtcgccatacataccttttccaccgaacttgggcaggagagcaggatgtatatttatgattttatcgggataagcatgcaaaagcaaatccggcacgcggacaaggaaacctgccagcacgataaagtcaatgcgatattcctgcaaaatagccagaatttcatctccggctgtccagtcctccttcgggaacacgttacagggcactttcaaacgatacgcacgttccaaaacgtaggcatcacttttattagaaagtactaacgacacctcaacggagtcgctcttctggaaataccggatgagattctcggcatttgagccggaaccggaagcgaaaatggcgatgtttttcttcattatactcgaattcaatgcacaaaacagtgaaaaatgtgcaaaagactgcatttatttagtcaaatatttgcgcaaaacgataaatattcattcctttgcaccgcaaatttaaagaaataaaactaattattaattaaaaacttaaagttatgtctgaaattgcatcaagagtaaaagcgattatcgttgataaattaggcgtagaagaatcagaagttactaacgaagcaagcttcactaacgacctgggagcagattctcttgacactgtagaacttatcatggaattcgaaaaagaattcggtatctctattcctgatgaccaagcagaaaagattggtactgtaggtgatgctgtatcttatatcgaagaacacgctaagtaattatccgatttcatcaatatggaattaaaaagagtggtagtaacaggccttggcgccattactcctgttggcaatgatgtacccgaattctgggaaaatctagtgaacggggttagtggagcagggcctattactcattttgatgcgtcgcaattcaagacccagtttgcatgcgaagtgaaaaacttcgatgtaactaaatatatcgaccgtaaagaggcaagaaagatggacttatacactcagtatgctgtcgctgttgccaaagaagcggtatcggactccggtcttgacgtcgaaaaagaagatttgaacagaatcggtgttatttttggcgccggtatcggtggtatacatacattcgaggaagaagtaggcaactactacactcacaaggaaataggtcccaagttcaatccgttcttcatcccgaagatgatctcggatattgctgccggacagatttctatcatgtatggcttccatggtcctaactacgcgacttgttcagcatgtgctacttctaccaatgccattgcggatgccttcaacctgattcgtctgggtaaagcaaacgtaatcgtatccggtggttcggaagcagccatcttccctgcaggcgtaggcggtttcaacgctatgcatgctctgtcaacacgcaacgatgagcctagcaaggcttcacgtccattcagcgcaagccgtgacggcttcatcatgggcgaaggtggcggttgcctgattttggaagaactggaacacgctaaggcccgtggtgcgaaaatctatgcagaagttgccggtgtaggtatgtctgcagatgctcatcacctgacagcttcccatccggaaggtcttggtgccaaactggtaatgctgaacgctctggaagatgcagaaatggatccgaaagaagtagattacatcaacgttcacggaacatctactccggtaggtgatatttctgaagcgaaagcaattaaggaagtattcggtgatcacgcatacgaactgaacatcagttctacaaaatcaatgactggtcacttgctgggagctgccggtgcggtagaatctatcgcaagcatccttgccatcaagaacggcattgttcctccgactatcaaccacgaagaaggtgacaacgacgagaacattgactacgaccttaatttcacgttcaacaaagctcagaaacgtgaggttaatgttgccctgtccaatacatttggattcggtggtcacaatgcgtgcgttatcttcaagaaatacgctgagtaaaatcgtgttacgtaaccaaatagataagataagactcctgttccgcaaagacagagagtcttatctttgtttttaccggatactcggattttatccgcacaatatccagatctacgaacaagcgctcctgcacaagtcatctgccgtccgctccgagaagggacgtccgctgaacaacgaacgactggagtttttgggtgacgccatcctcgacgccatcgtaggagatattgtctataaacgtttcgaagggaaacgggaaggtttcctgacaaacacacgttccaagatcgtacaacgggagactttgaacaagttagctgtggagatcggtctggacaaacttatcaaatattctacccgctcctcttcccacaacagttatatgtacgggaatgctttcgaagcatttatcggagccatttatcttgatcaggggtatgaacgttgcaagcagtttatggagcagcggatcatcaaccgttatattgatctggacaaaatatcccgcaaagaagttaacttcaagtccaagcttatcgaatggagccagaagaacaagatggaggtttcctttgagttgatcgagcagttcctcgaccatgacagtaatcccgtcttccagacagaggttcgtatcgaagggcttcctgccggaaccggtacgggctattccaagaaagagtctcagcagaatgccgcgcaaatggctatcaagaaggtgaaagaccagacatttatggatacagtcaatgaagcgaagttgcagcattcgatgccgtcagaaatggacacagaattggtcgagcccgaattgactgagtcggaagccatggaaccggataccttggagaccgaaacaccggaagtggaaacggctgcaaatgaagtcgaaacgactgttaatgaggtcgaagcaacagaaactgaaaaggcatgataactccaactaccatcctaacgataaaagagtaaattataagttaaccgaaacaaatccccatacggcggccttgaattactaaatcgtgatcttcagttaccaacttcaatttaccggccacttcttcaagagggatggatgaaatgtcatctccttttaaagcaatcatacgcccgaattgcccgttagcaatcaattctgtcgcgtgtcctcccatacgggtagacagattacggtcaaaaggagtaggcgaaccaccacgctgaatatatcctaatacggtttcacgtgtttcgatacccgtttcatattctatttcctgtgcgatgtattccgcagcacgtttccgaccatccgtcaggatgccttctgccaccactacgatagaatagggtttaccttttttcagtctttcgaggattgtatttcctatattcttgatgttgtaagggatttcggggacaagaatgacgtcgccgccacctgccatgcccgaatacagggcaatccagccggctttatgccccatcacttcaataaccatcactcttttgtgcgaactggcggtagaatgcaagcggtcgatggcatccgtagcgatgctcacggcggagtcaaatccaaaggaaatatccgttccccaaatatcattatcaatggttttggggactgatacgatgttgacgcccattgcggcaaatttagcggcagttttctgcgttccgtttcctccgatgcagacgacacaatccagtcccatttcctgaatattctgaagaatcagtgccggcttgtcgacatccgagacgacgcctccttttttaaaaggtttctcgcgcgaagtacccaacatcgtacccccttggttcaacaatccggataaggatttatcagtaaaggattcgatgtcttttgtcagcaaaccttgaaaaccactatgaattcctattacttccatcccatagtgattgatggcagttttgcacacgccacggatagtggcatttataccggggcagtctcctccggaagtcaggattccaattctcattgtcgttttttttagtcagaaactcgggattcaagaaaagtcgccaaattttaacgattatttccgtcgtaaagatagaaaaaaaagataaataaggttacttttgcacgactaaacattattatgttaaagcagaaatgaatattacaaagattattagtaagactttcgattcccgtttaaaacaaatagacctttatgctagtcaggctagtgagatacagcaccgtgtgctgagtcgcttagtgaaccaagctgcacagacagagtggggaaaaaagtacgactacgcctccatccgtagctatgaggatttcagaaaccgccttccaatacagacttatgaggaaataaagccttatgtagaacgcttgcgggcgggggaacagaatctgctttggccatcggaaatacgctggtttgccaaatcatccggaacgaccaatgataaaagcaaattcctgcctgtcagcaaagaagctctggaagacattcactatagaggcggtaaagatgctgcggcactctacttccgcatcaatccggacagtcactttttctcgggaaaagggttgattctgggaggcagccatagtccgaacctcaactccaaccatagtttggtgggagacttgtcggcgattctgattcagaacgtcaatccgttaatcaatttcattcgtgtgccgagcaagaaaatcgctttgatgagcgaatgggaaaccaaaatagaagcaatagccaacagtactattccggtcaatgtgaccagtttgtccggtgtaccctcatggatgctggtacttatcaagcgtattctcgaaaagaccggcaaacaaactctggaggaagtgtggccgaatctggaagtattcttccacggcggagtggctttcaccccttatcgtgagcagtacaaacaggtgattcactcaaagaagatgcattatgtagagacctacaacgcttccgaagggtactttggtacgcagaacgatctttcagaccctgccatgttgctgatgatcgactacggtattttctacgagttcattccattggaagaagttgataaggaaaatccacgcgcttactgcctcgaagaggtggagcttaacaaaaattacgcaatggtgatttctacgtcctgcggattgtggcgatacatgatcggtgatacggtgaagtttaccagcaagaacccatataagttcgtcatcacaggacgtacgaagcatttcatcaatgcttttggagaagaactgattgtagataatgccgaaaaaggcttagctaaggcttgtgccgagacaggtgcacaggtgagcgaatactctgccgcaccggtatttatggacgaacatgccaaatgccgtcatcaatggctgatagaatttgccaagatgccggattccgtagagaaatttgccgcaatacttgatgctacattgaaagaagtaaattcggactatgaggcgaagcgttggaaagatattgctctgcaaccactggaagtcatcgttgcgcgtccgggattgttccatgactggctggcacagaagggaaaattaggcggacagcacaaagtgcccagattaagcaatacacgcgagtatatagagtcaatgctggtgctgaacaacgaataaagttatccgaacaaattaaatcattatatgacagaaagtatcctacagtgtacataatatgcactgtgggactttttttgtatcaccagcttgcaactggtatctgcaacgctataagcaacagataaagaataaaatgagtcgattctgttgcagatggcagatgatttttactttttcaaactttatagagactgaagcaatgattcttctacaatgattccaccgcctaacaacaagccatctttatagaaggcagcagcctgcccggatgcgattgccgtcaacggttcgtgaagttgtacatgcaggaagttatccgttgtaactgtcacagtacaatgattttcctgtttccgatagcgaatcttcacaatgatatccgcatgccctaacaaacgttcccgattaacaatattccaatctttaaggaacatctccgttttctccaaagcctgtagggaagcaagtactacttcattcttttccgggcgaatttccttcacaaagacggcacgattcaaatgaatgcccaagccacgccgctgtccgacggtataaaaaggatagccctcatgccaggctataaaatctcccttttcatcgacgaatcgtccacgtctgacttccgttgaccaagtctgacctgcactgacctgtggctgacctacgctgacctgcgactgacaattgctgaccaaccactttttcagaaagcttcgataatccatcgggcaaaagcaaactcccaaactgtcccttttcaccgccactttctgaaatccccgttcagcagcaaaggcacgtgcttccactttggtaatatctcccatcggaagcatcattctccgaagaatatcctgtttgagtccccataagaaaaaggtctgatccttgtccgaatcggcagcgtaagttatataacaggtatcatccacctttactttccgtacataatgccccgtagcaatataaaaaatccccatttcatcggcaattttggatagaagaggccatttcagatagttattgcacaatgtgcagggcacaggagtatgtcccaccatatattcacgcacaaaatattcgatgatctgtttgcggaatatctcacgggcatcatacgtgatatggcggattcccaaacgctctgccaaatggcgggcatcttccagatattcggtcgagtcgttcaactcatagaaacggaaagtaactccggtcacctcatatccggcttccagcaatcgcatggcagctacggaactgtccgtaccgccgctcattcctaacaatactcgtttgttttcttccatcatgctgcaaaattaaggattttcccgtatctttgtttgttaaagcctaaagagaatggaagagaaagcaaataccggacaagttatcatcgttttaaccgaacatctgacgttcggcacactgctgattccttatatggcagagaaatctgacgacggtacataccaactcattgaacaggcttttcacgcttcacccgaagcaatcagccgaatgaacgaggccgagcaacaagctatcgacatcgcctcacattatacagagaaatatctgatggggatctattcgcgcgagaaaacagtatcccgttttctgcgtaaattatccgaagatccggaacgggtaaagaacaatatccgcccattcatcgagaaaaagttgcaggagatgctggcattgatacgccatcataatctgcctctgtatcagaaacaggtcggaagcaaactgctatatgcgcatcatgcctatcatgtgcaccctcatgacgtagagatccgttttacgtttcttgccgacgagaccaatttccgctaccagctgcaatgctattatgacgggcagccgctctcattaagtgagcagaagcctgttatcgtgctgacctcctcaccgtctgcccttttactgggaatggagctgtacttctttccgcatattgagagcgtacgcattctgccctttaccaagaaaaagaaaatcagcgtccctgcttcccaaatcgagaaatatatcgataacatcgtcattccgatagcacgctatcatgaaattacgactcagggactgaatatcattgaagagacgtatgcctgcgaagctgtcctgtctcttgaagataccatttacgacgaacagatgttgcggcttagcttccgttatggagaccagtcatttactcccgacaccgtgaccgaaatgaagaagatcatttaccggaacgatttcggcgagatattcttcttccgtcgggatagcgatgccgaagaagagaagctccggatgttaacggattccggcttgcaacgagtcagcgacgttcatttcaagctgtcgcccgatgcgcctgaaaagacaattaccgaatggatcagtacatatcgggagatgctccaacagtcttttctgctgacaggaaatatggagaataccccttactgtctggacgaaatccgcatcgaacagagttgtgatgatgagcccgactggtttgaactgcatatcacggtagtcatcggcaatctgcgaatccctttctcacgcttccgcaagcacatccttgaagagaaaagagagtttctgttaccggacggacgcatgattcttttaccggaagaatggttcagcaaatatggaaacctgttggaactgggcacccagacggagacggggattcgtctgaaaccgacctttgtcggtgccgtacaatcggctttagaagagaacggacctaaaaacctgcctttcaagagagagatacgtaatgttcctgttccccaaggactgaaagcggaactacgaccctatcagcagaagggattctcatggatggtgcagctgaacaagcaaggattcggcggctgcctggcagatgatatgggacttggaaagacacttcagaccctgacactgttgcaatatatatacaaaccgctttctcccgatgcggtcactgctcctatgaagcccgtatttacagaaaccacagcttccgacaatcagccggacaaggaatgtactgccggcaatcctcccgccagagagcagatagcagatgccgaaggacaattctctttattttcgttctcctccgaagatgagctgctgccggacacacgggaaatcagagagaaaaataaaccgaaagaaaatgatcatagacaggaacacggaaagaactcccgtaagcctgccactttgatcgttgtccccacttccctgctccacaactggcgaagagaggctaaacgcttcacgactcttgcgatagcggaatataacagcaacaccacgtttcccaaaggacatccggaaaagttcttcaatcatttccatctgatattcacgacttatgggatgatgaggaataacattgatattctccgctcctacacattcgaatacatcgtacttgatgagagtcagaatatcaagaacaatgattcccttactttccgttcggtcatccagttgcagggcaagcaccggattgcacttaccggtacgcctatcgagaactctctcaaagatttgtgggcacagttccgttttctgcaaccggacctgctaggagaagaaagcgcttttcataagcaatttatcattccgatccggcaaggaaacgtccgtatggagaaaaggctgcaacagatcatcgctccgtttatccttcgcagaagcaagagcgaggtagcgccggaacttcccccgcttaccgaagaaacgatctattgcgccatgtccgaaaagcaggatgagagctacgaacaggagaaaaacagcctccgcaacatattactccagcaacccgaaaacagagacagataccatatgttcagcatcctgaacggtatcctgcgtctccgtcaactggcttgccatccgcagcttatctttcccgacttcgacgggatatcgggaaaaacggaacaaatcatcgatacctttgacacactaagaagtgaaggacataaggtacttattttttcttcctttgtccggcatctggagatacttgccgaggtattccgccaacggggctggaagtatgctctgctgaccggttccaccaacaaccgaccttccgaaatcgcccatttcaccgagcaaaaggatgtgcaggcattccttatttctttgaaagcaggaggagtcggtcttaaccttacacaagccgattatgtatttatcattgatccctggtggaatcctgctgccgagtcacaagccatcgcccgtgcacatcgtatcggtcaggataaacaggttatcgcctatcgttttattactcagaacagtatcgaagaaaagattctccaactacaggaggacaagaggaggctggcagaaacatttattacggatagtgaggcactgcctgcactgagcaatgagcagtgggcggatttgctgcaataacaatcaaacatctcactattgcaccataaaagtgcataatctaagcatattttaattaccacgcactttgtagtcatccattttctcctatctttgcaacccaaaacaatgcgacatgaaatacaaactcatagtgctcgacctcgacggcacactcaccaattctaaaaaggaaatctcttcccgcaaccgggaaacgctgatacgcatacaagaacaaggtatccgtctggtacttgcatcagggcgaccgacttacggcatcgtaccgctcgccaacgagttacgcatgaatgagttcggcggatttatcctgtcctataacggtggagagatcatcaactgggaaaccaaagaaatgatgtacgagaatgtactgcccaatgaagtcgttccggtactctacgaatgtgcccgcaccaatcatctaagcatactgacttacgacggagcagaaatagtgaccgaaaactcacaagatccgtatgtacaaaaagaagcctttctcaataaaatggcgatacgggaaacaaacgacttcctgactgacatcaccctgccggtagccaagtgcctcatcgtcggggatgccggcaagctgattcctgtagaatccgagctttgcatccgcctgcaaggaaagatcaatgtcttccgttcggaaccttatttcctggagttggttccgcaaggtatcgacaaggctttatccctcagcgtactgttggaaaatataggaatgacacgcgaggaagtgatagctataggcgatggctacaatgacctgtcgatgatcaaattcgctggtatgggcatagcgatgggcaacgcgcaggagcctgtgaagaaggctgccgactacattacactgactaatgacgaagatggggttgcggaagcgatagagagaatcttcaacgtcccataaggcattcttccttcagcagatcagacaaaatcccttgcaagttaagttgaaatcaattatttattctaactttgcacttccaatagaacaaatataaaatgttatggaacatcaacttaccatttacaacacgttagatagaaagaaagaattgttcgtaccgcttcacgcaccgcatgtaggcatgtatgtatgcggaccgacagtatacggtgatgctcacttgggacatgcccgtcccgccatcacatttgacgtactcttccgttatctgactcatttaggatataaagtacgctatgtacgcaatattaccgatgtcggtcatctagaacacgatgccgacgaaggagaagataagattgccaagaaagcccgtctcgaagaattggagcctatggaagtcgttcagtattacctgaaccgctatcataaggcaatggaagcactgaatgtactttctcccagcatcgagccgcacgcttcgggtcacattatcgaacaaatccagctcgtacagaagattctggacgccggatacgcttacgaaagcgaaggttccgtctactttgacgtagctaaatataataaggactatcattacggcaaactctccggccgcaacctcgacgacgtactgaataccacccgcgacctcgacggacaaagcgaaaaacgtaatcccgccgacttcgccctctggaaaaaagcgcagccggaacacattatgcgctggccttcgccatggagcgacggtttccccggatggcatgccgaatgtaccgccatgggacgcaagtatctgggcgagcacttcgatattcacggaggaggaatggacctgatcttcccgcatcatgaatgtgagatcgcacagtcggtagcttcgcaaggcgatgacatggttcactactggatgcacaacaacatgattaccatcaacggtacgaagatgggtaaatcactcggcaacttcatcacgctggatgaattcttcaacggtactcacaagttgctggcacaagcctacactccgatgaccatccgtttcttcatcctgcaagctcactatcgcagcactgtagacttcagtaacgaagcattgcaagcttcggaaaaagggctgcaacgtttgatagaagcaatcgaaggactcgacaagatcactccggccgcaacaacttcggaaggtatcaacgtgaaagagctgcgtgctaaatgctacgaagctatgaatgacgacttgaatactcctattgtcatcgcacagcttttcgaaggtgcccgcatcatcaataatatcaacgcaggaaatgcaacgatctccgcagaagatctgaaagacctgaaagaaactttccacctgttctgcttcgacatcatggggctgaaagaagagaaaggttcttccgacggtcgcgaagccgcttatggcaaagtcgttgatatgcttcttgaacaacgcatgaaagcaaaagccaacaaagactgggctacttccgacgaaatccgtaatacattgactgcactcggatttgaagtgaaagatacgaaagatggtttcgaatggagattaaacaagtaattcaagttctccctagcagactgtctcattaatcgcatataaaactgagggtcgattcttcgctgaaccgaccctctttctttcatagaaacacaaacatcaatacctatttaaattctctcttcatttattttcaagaatcatttccaccggttgtccatgctgacaagttacatccagtatcgtatgggcacctttatattcaagccttacattcgccggtgtctccaagaaactccagcggcctttcagctctattattttacgaacagggcggctcggttcttttgtcgtatacgtcttttccgcaatattcaagtttgggtcacagacgctgagacgaatcgccttttttccctctgccgcatacatgaccatcgtttccgcaggaatggaagcaaccaccagcttatcgtcagcagaccggtaatcttcaaaaacagcatatccggttatacccgttttcctgtcatagacaatatgcgcagtctgatcacgttgccatacttcgtatacaggcgttttcttcagttcatccaaatccgaagctgaaggctgaatcagtaccatatattcataagtagcattcttcggggcgttgccatgttcaatccaggcagaagaaaatgttcctttagtcttttcgcgggttttctcatgacgcgactcctgttcggctatctgtgaacgaagggttccgtcaactacatgataataattatcatagccgtcgtgcaaccaatagttatccttacctgtcttctgctctttgccgttaaatttcgtctggaagagagtggtctccgtaggatagtcagcattgctgttcgtgatgcctgttccgaggcagatcatccggttatcaaaacagaagacggatttacgggctacaaagtcaggagtaaagttctcataatcacgttccgtcagtttcattgcaaacattccgttcatgccgcctaaagagctgcttccggaaaagttttccgtagaccgtgccatcgtcgtacctttcaggggactgtccaagagttcaaaaggaagatgaatggtggtcgtaccgggcagacggttccagtcccatccttcctgtacaaaaccacttccggcacgggagacgggatttccttttcccataatctgtaccgatccgtagctttgataacgtccgtaacgattatctttcgcatagatttcagcaccccatacatctgtggtatatcctttcagtgtcaccatccagtctgcacggcggaaaatacctgccgatccatagttataaacaaaaaaaccgtggggagcctgtgcaggctgaataccttcttttctgaagaaatgtgcattccttgtattccgatcacgtatcagacgcaaataatcggcggccagtccatgatcgaatgtatttccctgaccggacaagtctcctgacaatgcaatattggcaaatgcttctatatcatcgcttcccatctttccgccaaaaggatggcgaccgctaatgcctgtcccccattcgtaaaggttacaataattgcgcatggcgaggaaggcagacttgatatgttgccgtgcctcttccgtcagttcaaatccggtcccgttggtgagagcgataaattggccgatggtagccagtactccggttgtatagccgggatagaaacctccgtgatgaaaggtcgttccatctactttgataccgccgagagtgcccggagtataattcagcgatgaagacaaccagcgcgacaaaccattcaaagcctgttcctgttctcttgcatcggggaacatcatggcggagataaactttgccatcaagagcgtatgccatgaatccagtaattcatcccgctccggcggacacggttgacgagtctcctgtaaagcagcccagaaacgtaaagtggatagataggcatcccggtgaggatgtttataaatcgcgtcccgcatgagccaggcggtagtatatattttacgtacctgatagccgtaatgatggttcgtccccatgccgctgccaaaagcgaatccctgatccattgcatagtcgaatacggtaaaatagttcttcttcgatgtctcattctgattgtagaaggcatcgtatgcaaaaccggcaagcatcgtttcgatatcattccatgacatctcccctttcttcttgtcttgctcgtccggtgctacaacaggagttccggtaaagccggttccggctgcggagggagcaatggcagctctttcaaaagtcttccttgcagcgttgatctgtccttggggagctttcttcacatcgagaaattcagtcaggcgttgttcgattgttttcaagtccttcttttgccgagttgtcagtttagaaagcaaggggacatcataagactgctgttcccacttccatacaagacaccaatgccagaggtcacgattggaaagaccgttgttagctggcagttgttggtccggtgtcgtgcgcaggttcatcttcttttccggaaaggtcaggcgatccagaaagatgcgccctttacggtcgggagcgaccagacgataagaaactatatttttatctttcttatccccgttcatgtaggcgaaagatatccagcaagcccgccagcctgccgcttgcagatgatacgtgaaccaataagagacttcacccgccttatttagaaactcaaaacggatagagtcctgttggggtttctcgttatatatccacagggtaataccaaattgctgttcctttttggcattcagcgataaaggttctatctgaacgtccagtgtcgaggcaggttggaaatcccattccagactgctttctccctctttatagaaaagagaagaaagtttcacttcacctttccccgaaactttgaacgtctcgggaaccttttcttcaaaccctatgacctgcgcataagaggacaaagaacaaaacaagaacagaaatataaaacaaacagctttcatgatcattaattgtttaaaggcagttcttaccacacccgggtgtcaggatgcacgacacccgggtgtcagcatgtatgagatccgggtgtcggtatgtatgagacccgggtgtcggtatgtatgagacccgggtgtcatacaaaccgtattagtatacggtatcagtaaggtatacggtccgaaagaatcttttccgtataccacggatcgtcgatttctttcagcattgttcccatttcacgataaagttgctccacaacttccttattttcatccaaaggcagattattcagctgataagggtcgtttacgtcatcaaacagcagacttttctttagctgtttcgtcttccggtcgatatacagagccaatgtatagcgagccgtcttaatgccgcgcgaagaggggaaataagattgcaccaatccatccttatctttctctccatccagattctgaatatacaacgcacctgccggacgaacaatttccgccttttcatcgaagaaaagaggtgcgaagttgcgtccctgcacctcggaaggaatcgaatcccccagaccgcacaagccgagtacggtaggcataatgtcgggagcagaaagcaacaaatcatctacccggggctgaatcttaccggggaaacgaaccaggaacggaatattcatagattcggaatagggagagttcttagggtcgtccgttcgctggctgcacattgtttcgccatggtcggaagcaaagatgactactgtatttttatccaatcccaattgtttcagtgcttccaaaatctgtccgaaagcacggtctactccggtcacagaagcaaagtagtaacggacggattccgcttttttcatattcagatctacgtttgggcgaatcagcagactgtccagcggttgatctttataaagattgaagtcctgttcttcacaatcgttcagcgaacggtatgggctatgcggcgggttcattcccaccatgatgaagaatggcttcttcgtatcacgcacgtttccttcattcttgagataagaaacaactttgcccgactcatggagcggtgaccattctttcggatcatgcctcttgccgtccgtatcccaataatgcgggttcttatgttcgtcaaacgtgccgtacgaataccaatagttgaaaccatggcgctgctctttcggcgtataagcgtcccacaccggacgctgtgtttctacatattgtcccggattctccggatcattcggggtcgggaagtcagcgtgaagtttaccgaaataagcacaatcataaccggccttgctgaatacgtcgcctatgcactccgcatcgtcacgcaaagagctgataggacgtgtagagttacagttcaaaggtacaccactgcgattcggatacataccggtcagcaacattccacgatgggggctgctcagcggacagttgctttgagcggaagtcagcaccatagattcacgtgcgaaagtatctatgttaggagtatgcacggggtctccccggaagtttactttatctctgaaaccttcctgattccagaagcccattgcctgattgcgatactgatcaggaaatacatagatgatgtttggatgtttcgcttgctctgccacctgtttgggggctttacagccttgcgctgcaaagagggtcaagcctcccatcaataagtttactgatttgtttatcatgatataaagaataacagttaatgtaccggaagagactaatatatgcacatatccggctaaagtacaagcaaggcagttcttacttcttttccaggtctcttttgcgcatcaatccttccaggaagtaatagtcagcgtagttcaaaggcacatctatttcctggccgtgagggatactgcccacagagtgcatcaatataaagtttccattcgtacccactttcgcacgataagccggtgagccgaggctttccataatcttatcagcagtttccttatagtgattgcccggcagataaccgtcgagttcgtacagagcagaggccgtacaggcggctgccgaagcgtcacgaggttcgttcggaatgttcggagcatcgtaatcccagtaaggaacgaggtcttccggcaggttcttattggtaaagatgaagttatacaccttctgtgcctgatcgagatacttcttgtcttttgtatagcgatagcaagtggtataaccgtataatgcccaagcctgtccgcgagcccatgatgattcgtccgcatatccttgtgctgtttgtctcttacgcacttctcctgtttcgggatcgtagtctaccacatgatagcaactgttgtccggacggaagtggtgagccatcgttgtatccgcatgtttcactgctatattgtaaaaggtagagtcaccggaaaaagccgtagcttcaaacagcaattccagattcatcatattatcgataatcaccggacatttccatccgcgtgttccctgccagcctttatcggcatcccatgactggataacgcctgctcccggacggaaacgggtagacaatgattttgcggcttctacaatcacatctttatattcttttttatctgcaaaacggtaaccgttaagataactgcacccgatcataaagccgacatcatgatgccacttcagatatttcacagaatcgagggcttctgtgtatttttctgccaaaggcaaccactttttatcccctgtcagattgtaagtcagccacatgctgcccggaaagaaaccggagcaccagtcatcaataggtatataggagatactaccatctgcattgatggttcttggattcagaattttaccggatttctcgataatgtctgtctgaattgtgttttgtgctactgcgttgtcgatgttgtcctgaataaaatcgacttcaacctttttttgtccaccgcaactcgtaaagatcagaagcgaaagtcccaatgcgctaagaattgttttcataatacatggattatttgttaagttaataattatctggtggcaaaagtagtactttcaaatagaatagaccgtcccaaataatccaattcagggacaaatttggtacatttctcccttgaagggcatatttgcacagatattccccaaaagcctgcttaattatttaatgaaattgaaaatgcaattataataatctgactaatatataatatattctggtcatttcaaaaaaaaggcattctaactcttctacatttttattatatttatttgtaattaaccgattgattgttaattataattatcgtcatcacacctacataaagttatgcaaactaaataagaaattacttatttagttagctttgccatgtcttttctcagtcaaactcttcgttgatgagaatcagacatatatagatatttgtacttaaatctacaacatattatgagcacaacatgccaacatcaacaaggtgaaggatacctaaaactcctaaagatttagatacatattatgcttataataagaaagataggcaaacgttgtaagcaataatatttattgttcggatgcactttaaccattttattatttatatttatgaaaaaccacctaataacagtacttgtctgctgtttattcttcatcggttgtaaagatgataaagccaactctaatcagtatgacccatctcaaccagtagtatttacagattttagccctaaagagggaggtatgcgaacccgcctgtacattgaaggcagtaacttcgggaatgatcccaccaaaattcacattacgatcggtggagaaaaaaccaaaaccatcggagcagatggaaaaaagatttattgcatggttccttccaaggcttttgatggaataatcaatgttcgtgtagatggtccggatggcaaacctattgcagaacatacatttgaagaggaattcaagtacactcctgcaacgatcgtaggtaccttgctacgtaaggtagacgaggataataattctgcatttcaagagggttcgttcgatgaaggagcttctattccttccaatgactgtatggtgttcgaccccaagtacaaggatggggacaaccggttacttttttcttcaaaccattctgacggtctccatctaatagacctgacagaacagactgtaaaacgtctcttcccaagaacgggatatagcacaatgtattctttcacattcagtgctgacggagacacgttgctgtttaccgatgatcacggtcaggacaacaccacccgggcaaatatctattattctctccgtcgtgaaaactttcgacgaattcgtccctacaactatggcaggacagcatatagcttagtgtatatggatgacggaaccatcttttacaccacctggtgggagggaaaagtctacaaaatgatacgcaatggggctattcccaatatcgacgagaatgcggaggttgcctttagcctgagtcagatatcggcagtgggcggttcacatacgatattattcaggcacccgtccaataaatttatgtatatgctttccgacaattttggcgcagtgttcagagccgattatgatccggtggcaaaaacattcggtaatcctagcatcattgccggaaacatgaacgataaaagtttcaaggaaggaacgggaggaagcgcccggtttaacaaaccacagttcggtgtattcgtaaaaaacgagaaatacggcgaaggaattggtcctgacaacgaccaatatgacttctatttttgtgacagagaaaatcactgcatctggaaactggatcctcatggggtagcgtctcttgcagccggacgaagtaacgaaaacgccgatggcaaaatatggggatacgtagacggcaatccattgcatgaggcacgtttcaatcagccagccggtcttgcttacgaccctgatacagatatgttctatattggagatattgataataaagggattcgttatatgacaacggaataatactatttaaaacacaagtaaatatgagaaatgtaatcttactatttttattgatagtaggctggacaactacagtctacgctcaaaatgaacaagagacgattgaggtgacgggaatcgtcactgatccaaagaacgaacctttaataggcgtgaacgttacagcaagaaatatgcccggcttcggtgcgataacagacataaacggacgttacaagatcaaggttcccaattactcttacttgattttttcctatgtgggatttacaaagcaggaaatctttatcaaagataaaaaaatcattaacatcgttatggcagagacgaaagaaacggtcatcgacgaggttgttgtcacagggaccggtgctcagaagaaggtaactgtgacaggtgccgttaccacagtcgacgtttcccagctacgtactccgacggcaagcatcaccaatgctcttgcaggcaatgtagccggtatactcgcccgccagacttccggacagccgggtagcaatatttctgagttctggatacgcggtatctccactttcggtgccggaggcagtgcattggtgttggtcgatggcttcgaacgtgatatgaatgaaatcaatgtggaagatatccaggacttctccgtgttgaaagatgcctccgcaacagccatttacggttcacgcggtgcaaatggcgttgtcttgatcacgaccaaacgcggcaaggaagggaagacccgcgtcaatgccaaagtagaaacctcgtataatacacgcaccagaactccggaatttgtggacggtccaacatatgcccgcatgatgaacgaagccttggttagtcgtagtcaggctccggcctatagcgaaagcgacttggaactgtttgcaaacgggctggatcaggatcttttcccgaatgtggactggatgaacttaatactgaaagacggtgcccccacttatcgcgcaactgtagacttgaccggaggtggtacggtagcccgctatttcatttctgccagttatgtaaatgaaggcggcatgtacgagacggatcgtgcaatgacggactataacaccaatgccaactaccatcgctggaactaccgcatgaatgtagacatagacctgacaaaatccacgctgctaaaagtaggcgtatcgggttctttggacaagcagaacctgccgggaagccagtatcatgaaatatggcactcgctaatgggatacagtcccatcgcttctccggtacagtatagtgacgggaaatgggcagcagtcggtagtgaaggacgaagaaatccgtgggtactgaccacccagcagggatatcaggaaacatggaagaataaaatacagactacggttaatcttgaacaagatttgaaatttatcacaaagggattaaaattctacggacgtttcggattcgatacatatacggataacggtgacaaccgtttcaaatggccggaaagttggttagcggaacggcagcgtacctccgacggagaactgcaattcagaagaatagagacgcagaaactgatggacggaacgatgtattcaagtggacaacggaaggaatacttggaggcagagctacactataaccgtacgtttggcgaccacatgctaggggccgttttaaagtattctcaggataagactaccaatacatctcacaacggcaatacagatagctacgagaagattgtgcagagtattcagaatcgtcatcaggggtttgcaggacgtttcacatacggatggaaataccgctacttctttgactttaatttcggttacaacggctccgagaacttcgcctcaggtcagcagtttggattctttcccgcctattctgtagcatggaacatcgctgaagagtcaatcatcaagaaacatctcaaatggctgaatatgtttaagctgcgctactcatacggtaaggtaggtaacgacaatgtgggaacccgcttcccatacgtagagaaattcgggacatgggatgaagacggttattattacggtgatatcggcaccagtaattattattataccggactgacctattcgagaattgcgtcaagcagcatcacttgggaggtagccaagaaacatgacctcggacttgacttctctatgtttaatgataagttcagtggcagcattgactacttccacgaacaacgcaacggtatttatatggtacgtagttaccttcctcagatcatcggtctgaatcacatcacaacgaaaccttatgccaacgtgggttctgtcttgtccgaaggttttgacggtaatatcgcttataaacagaggataggtgaggtagaccttacggtacgtgccaacatgacctatagtaagaatgaaatcaaggagtatgacgaagagaacagccgctatccgtataagatgaaatacggattccgtgtagaccaggcacgcggcctgatagccgaaggattgtttaaggattatgaagaaatccgcaacagaccctcacagggttcaggcatcatgccgggagacatcaaatacaaggacgtaaacggtgacggagtcattaacggagatgacgaagtgcccatcggtgcgaccacccgccctaacctgatttacgggttcggtgtatctgcacaatggaaaggatttgatatcaacgttcacttccaaggagccggcaagtcatccttcttcatagacggattcaccgtatatccattccaagagaagtcatggggcaatattctgacggatgtagtgggtaactactggtcgctgggaatcaacgaagacccgaatgccaaatacccgcgtctgagttatggaggtaatagcaacaactatcgtgcttctacttactggctgcgaaacggttcgtacatccgtttaaagaatgtggaattaggttacagcatccccaaacggtttgtcaataaactccatttggaccgtgtacgcctctacctgatgggaacgaatctgctgaccttctccgactttaagctttgggatccggaactgggtagttccaatggacaacaatatccgttatccagaacagtgaccatcggactgacggtaggaatctaaaacaatcattaaaagaaaagttatgaataaaaataaatacattttattgggagcagtggtactcggcttgggactcacttcctgttccgatttcctaaatgtagaccgctatttcagagaccaacaatctacagaacgcattttctcggacaaagactatacacttcaatggctgtcattctgctacagtcgcctgcagggagataatctggaggtgggacacagtgacgtatgccctttcaatttctcagacgaccaagtattcaacgaacgaggagaccgttttgccaaattcaaacgcggcgaatatttaaattccactggtggccaaaatgcttggaaatggtcgtatgacggaatctatcaagcctccattctactgaatgaattgtatgagaatgaagatctcactccggaggaagtgacggacgtaagaggacaggcccgttttctgcgtgcctatttctactggttactgctgagaaaattcggtccgatacccattctaccaccggaaggagccgactatacaaaatcgtatgacgaactggcctacccacgtaaaacctatgatgagtgcgtggcattcatcacttcagaactcgaaattgcagctaccgaactgttcgaaaaacgcgataacttgaacattgcccgcccgactaaaggagccgcgctggctgtacgtgccaaagttttcctttatgctgccagtccgctggtaaacgggaatacggaaatggcagacttcatcaacaaggacggccaacagttgattccacaagaatacaatgaagagaagtgggcaaaagccgctgctgccgccagagacatgatcgagtactcggaaatgagcggactctacaaactttatacttttgaaaggcgcccggttagtacagacgaggcttatccaactactattgaaccgccatatcatgaggaatacagtaacaagccttttccggaaggatggtccaatatagatccatttgaatcatatcggtctctttttaatggagatatctatgcagccgaaaatccggaacttatttttacccgaggaaccaatggtgacagcaatgacttaaaaacagacaacacgatggtagatttcgtaaagcatcaactgcccggaacttttggaggatataacgtacacggaatgaccctaaagcaaagtgaagcatacgctatggcagatggtacatcatttgacaaagaatgctatacattatggaaagggaagttcacaaacgatgaaaacaaagatgaacacaagtacgacaatgtaaaaaatggcgtatggtggggatataccaaccgtgagcctcgcttctatgcttccgtagctttcaacggagcacaatggaacgcactgagcattaaggaagaaggaggaaaagactcacgaaacaaacaaatctggtattatcgcggagcaaccgacggtcgtatcaatggatctgataactggtgcattacgggcatcggcatcatgaaatatgtaaatccgaacgattgcgccaaatggggaggctctatctaccagaaagtggaacctacacttcgttatgctgacatattactgatgtatgcagaagcactgaataatatttccgaagggacacactaccaggtggcctcatgggacggaagccagacttacgatatcttccgtgacaaagaacagatgcgccgtggagttaagcctgtccgtatgcgtgccggagtccccgactatagcgatgaagtatatgaaaacccgaaaaaattctttgaaaaaatagttcatgaacggcagatcgaattctttgcagaaacccaacgctactatgacctgcgtcgttggaaaattgtcgaagaacatgaaggagaacaaatctacggttgcaatacactgatgaacgaagaatacaaggacatgttttatctgccagtcagagtggccgaactacagacttctttctcacgcaaacagtacttctggcctatcagcttcgatgagctgaaacgcaacaataatctctcacaagctcccggatggcagaattatgattagtgttaacattataaaccaaaagatcaatatgagaaaattatatattttaggaatgatactggggatgtatgcaacattcagtgcatgcaatgacgagtggaaagatgaactttacacacagatgctttctttcaaggcacctttaggtgacaacggcttgagtgaaatttatgtacgctatcagccggatggaacaggaatataccagttgccggtcattgtcagcggctcgaaaagcaacagtcggaatatcgatgcaaaaatagccgtggatgaggatacgctccgaatacttaaccaggaaaaattccccgtaggtcgtcaggatctctggtatgtcccccttgcagaacagcattattcttttgaatcaaacatttgccatattcctgcgggagagaatatacagctctaccccatccatttcaactttaacgggttggaagtggatgagaaatacgtacttccgctgactattgaagaagacccttcttatgttcaaaacaaatataagggacattataaagcgctgctgggagtcaatctgttcaatgactactccggaacgtataacaccacgctgatgaacatctacatcgaaggaacgacaaccgatcccgctaaggtagatacgcgcttagcccgcgtagtggacgagaataccattttcttctatgccggttcaacgtgggtggaagatgagaaccgctccaggtataaagtattcgtcgagtttgaagaaggaacggaggacgaggaaggtactattaaaggaaagttgagattgtacggtgacgaaggcgaaccgggaatcaatatccgaccattgggagaatgcaaatatgaaaaacgaatcattcagcacgagaccatcaaatatatggaacgccaccttaccacactggaactgagttataagtacacggatgtcacttccaatccggattatccgataacttacgaagtaaaaggttctatgacaatggaacgccagatcaacccgttgataccggatgaggatcaagctattgaatggtaagagaaaattaaaaaaggaggagacaagcacttgattaaacatagaagcttatctcctctttcttttatcaggatactccatacagcatttttattagatgatacgaatgcaaacaccatactagtcataaggtattcgagattgatgaagaataataaccccctaaaaacgtaagtatccgacagccatatatgggaatatatttattacatttgcggaagaatcttgaattttaaattataggctaattcggctctcataacttatcattcaacgtttcaaattagtaattcaaaattaatcattatgaccccacaagagttttttaaaaaggacctgttcgccgaaaatgcaggcgtagtattgcttgaagtacgtgaaggatacagcaaagccaaactggaaataaaacccgaacatctcaatgccggagcacggacacaaggaggagcgattttcacgctggcagacctggcactcgccgcagccgccaattctcacgggacactcgctttctctctttcatcctcaatcacttttctgcgcgccagcggtccgggcgacaccctttatgccgaggcacgcgaacggtatatcggtcgaagcaccggctgctatcaagtagatgttactaaccagaacggagacttgatcgctacattcgaatcaagtgttttccggaaagatcagaaagttccttttactctgtagacagactatttaactatagaagtcaatggatgacgatgacctctgacatcatttaagaaagctttggctgaaccgaaattcaagaacatatctaaacggacaggaaggtggttcttatcatctgttacgaagaaagtaatcacttccttttctttcccttttttatcgtattcaactaatgagaagatcaggcagcgataggtaaccccattttccgctttcacattctcttttccccgataaatcagtgtctgttcttccactttacgtccggtagccatcgggaatttgattttatcgcctaccttataatcagcaggatcataagaacgcgcttgggcaaggatagtcagcatatcgtagatgcagcgactgtcgctttcttccgactcctgaacttctccgtcacggaacgtacgtttttgtttggcaaagcaaaggccgtctttataagagaaccaagcctcatctaccgtatagcgttttccttcctcggcacctttacggaaataacgaggttccagtttttcacccatgacgcaagtcagtgtatcgcgcatcttgaaaaagaagtcggcacgcttgctacctaaggcaagcagattgatacggtaagccggttccgaatgataggtagttgcattagtcgtcagactggctatacccgctttcacccaaacgaatttccagttgaagtacaagtcatacattacatgctctccggattgaaaagcatcgtttttagcttcacactgagcattggcaggaagcgcaaaacttcccatcaacaatgcaagaattccaacaattagatgacgtcgcaaattagcgacggttacggttttggttatttctatctctttctctttctttctttttcttgtcttcatctggtttttgtttttttagttcatccagtttctgtttgtctacaggagttgcgtgtatatcccagttttggtcaacatcccataacgctttatattcaacaaccttggggaaatagtaaacttcttccggttgtattccttttgcatagtctcccgtgtcccattctccgtttccatttctatcattaatcagtctggcggcatatttccccggattcaggtaatagaaatctgcccttccatcctccaccagtcttcgtcgaaccactttatcttgggtatccagtaattctacaaatgcctgaggatctgctcctgtaacaataaaatgaagagtaaaatattcatcctcgctacgtaccttaaatgattgttttatcttatcggtaaacaaaccataaatgccatgaaacgcagttgagtccaccgagaactcatattccattgtaggctcccaatcattttccggatacagattaaaccgcctcagattcaatgagtcttgttcgaattcgaaaggaatatctttccaaatcgtatccaccttctgccgcagatgaattgccgcagtatcaaaacttgcaatcggctcctcaaagtttaaagaaacatagccatacacgtccattgatgaaggtgcattcacattcaccggtaagaatttagtcggtatcggctcatcttcttcaccctctttctttttcttctttttcttcttctcgggctcttctttggtcagagtcttttgtttggataccaatttcaatgtatctgtacgcggaattaactggttcagcgtatccgtataaagataggtaaggctaagagccagagtatcctgtttatagagcaaagagtcctttacccaataatgaatcgtatcgttccgctggttcttttctatcacaaaagcctccttttcatcgaagttcaaccctttcagtacaggcagggtatctgctttgccagcaaaataaaaggtgaatttctggggaaccagtcgttcggactttatcaaatattgcgaataattgagttctttaaaagcacggagaatcacatcatccggcaaataatgcatatatttcttctcaacgatcgtatcataagtcaatgaatccacccaagccgtatccatacgaagtctttcttccatacgggggatgatcagtgaatcattaaaagcaatgacctcactcttctgagtgaaagcaaagttctgatctgaatccatcaagccaaagatacgatacttgccgggagctaccccacgaatagagaaacgcccacggctgtcggtacgtgccacacggtcgaaaggaagtttagtaaaggcggagtcattcagatttgcatgcagtccgaccagtatacctttaataggctccaggttagaggcgtcaagcaccgttcccgatacttccattgtatcgatctgcgcaccggtagaaaaagtaaatgcaaaattacccagaggattgccttcgttattatcgacgatggcatccgagaaatctatagtataggtagtattaggctttagtgagtcaagcagattcacttgtattttctttccggaagcctttatctccggttgttgaatctgaggaggagaaacaaccactttctcggttgctttctctagcttaataaactcatcgaactgaagagaaactttagtcctcttattattaatcgcacctgcagcaggggtactgccgacaaaacgcggaggatcgtaatccttaggcccgccttccggccgtccaatgctggcacaggagtacaatatagccaccagtgcaatcaccggaagagctttgcgcacgatatgttttatcttttgattctcaaattgtaacatgttgcaaaaataaacgttcttcaccaataaacactacactttctagctaatttattaaaaagtagccttaaatgaatgattattggtccttatcttgttaataaatccctatctttgactcccgaaattcaaacctaatacaaaaaacccatgaagaaacaactactttcctgctgtttggctgcactaggactaacaacagccatccaagcacaaaactttaacgagtggaaagacccggaagtgaattccgtaaaccgctccgcaatgcacactaattatttcgcctatgcatcggctgatgaagctaaagcgggcagcaaagaagactctcagaattttatgactctgaacggtctctggaaatttaactgggtaagaaatgcagacgcacgcccgacaaacttttatcagacaagttttaacgacaaaggctgggacaatattaaagtacccgccgtttgggaattgaatggttatggcgatccgatttacgtaaatgtcggctatgcctggagaaaccaatttcagaacaatcctccccttgtccccacagaaaacaatcacgtaggctcttaccgaaaagaaatcgttcttcctgctgactggaaaggaaaagacatctttgcccacttcggctcggtaacttccaatatgtatctttgggtaaacggccgctacgtaggctatagcgaagacagcaaactggaagccgaatttgatctgaccaactacctgaaacccggcaaaaacctgattgcctttcaggtgttccgttggtgcgacggcagttatctggaagatcaggacttcttccgttattccggcgtaggacgtgactgctatctgtatgcacgcgacaagaaacgcattcaggatatccgcgtcactcccgacctggacagccagtataaggatggtacactgaacatagctatcgacatgaaaggcagcggcactgtagctcttgacctgacagacgcacaaggaaaaagtgtagccacagccgatctgaaaggttccggcaaattggacacgactatcaacgtggccaatcccgccaaatggactgctgaaacacccaacctctacacattgaccgctactctgaaaaatggaagtaccattactgaagtgatccctgtcaaggtaggtttccgcaagatcgaactgacaggcggacaaatactcgtcaacggccaaccagtactctttaaaggagcagaccgtcacgaaatggacccggacggaggttatgtcgtttccctcgaacgtatgatacaagatatcaaggttatgaaacagcttaatatcaatgctgtacgtacctgccattatccggacgacaaccgctggtatgacctttgcgaccaatatggtttatacgtggtagccgaagccaatgtcgaatctcacggaatgggatatggagacaagagccttgccaaaaaccccatttacgcaaaagcacacatggaacgtaatcaacgcaatgtacagcgtggttacaaccatccgtccatcatcttctggtcattgggtaacgaagccggtatgggacctaacttcgaacattgctatacatggatcaagaacgaagacaagacacgtgccgtacaatatgaacaagcgggaaccagcgaattcaccgacattttctgcccgatgtattatgattacaataactgtatcaaatattgtgaaggcaacattgacaaaccccttatccaatgcgaatatgcacacgctatgggcaactcacaaggtggattcaaggagtactgggacatcacccgcaagtacccgaaatatcaaggtggatttatctgggactttgtcgaccagtcctgccattggaaaaacaaagacggtgtagccatctacggctatggaggcgactttaacaaatacgacgcttcggacaataacttcaacgacaacggcttgatcagtcccgatcgtgtaccgaacccacacgcttacgaagtaggatacttctatcagaatatctggactactccggccgatctttccaaaggtgagatcaatatctataacgagaacttcttccgtgacttatccgcattctatttggaatggcagttactggctaacggagaaatcgtacaaaacggcatcgtatcagacctgaatgtagccccgcaacagactgcaaaacttcaactcccattcgacataaagaacatctgttcttgcaaggagttgcttctgaacgtcagctacaagctaaaagctgccgagacattgcttcctgcgggagaaaccatcgcttatgaccaaatgagtatccgtgactacaaggcaccggaactaaaactggaaaacaagcagtcctccaatatcgcagtcgtagttccctctttccaggataacgaccacaactatctgattgtttccggcgaagacttcacgctcgaattcaacaagcacaacggttacctctgccgctacgacgtcagcggaacgcaactgatggaagacggaagtgcactgactcccaacttctggcgtgctccgaccgacaacgactttggagcaggattacaacacagatatggcgcatggaagaatccggaactaaaactgacttcattgaagcatgatatagaaaacgaacaagcagtggttcgcgcagaatacgacatgaaatctattggtggaaagctgttcctgacgtatgccatcaataataagggagcagtaaaagtgactcaaaagatggaagcagacaagagcaagaaagtttccgatatgttccgtttcggaatgcagctgcgtatgcctgtcaccttcaatgagattgaatattacggacgcggaccgggtgaaaactattctgaccgtaaccacgccgcaaggatcggcaagtaccgccagaccgtagaagaacaattctatccatatatccgcccgcaggaaactggtaccaaaactgatatccgttggtggagactgcttaatatcggcggcaacggactgcagtttgtagctgatgcaccgttctccgcttccgcactgaattatacaatcgaatcattggatgacggtgccggcaaagaccagcgacactcaccggaagtagaaaaagccaacttcacaaacttctgtattgataaggtacaaacgggactcgcctgcgtaaatagctggggtgctatcgctttggaaaaataccgccttccatatcaggattatgagttcagtttcataatgaatcctgtatatcataaactgaagtaaaaaacatagttaaaaaacacggtatcagagtacaagaataccgaatttaaagtacttttgcagccggaaacttatttcatggaataagtttccggcttttcttccttagatcatctatccatacaatgaatgtacacagcgacgaacgcacaattttaaaaaacagataaatataaagtatgaaaagtagaattgttttttttgcattttgcttagccctcttgtctagttgcggcaataagggcaatgacacagggaaagtcccagaatatgcagtacaagaattacagaagacaactgcaaatctaatgaaagcttatccggctactatcaaaggtagacaagacgtagaaatccgcccgcaggtatcgggattcatcacaaagttatgtgtagatgaaggagcaaccgttcgcaaaggacagctcttattcatcatagaccctactcagtatgaagcagcagtacgcacagcaaaagcttcagttgcaacagcagaagcagccgtgaatacacaacaaatgactgttgacaataagatcgaactgaacaagaaacagattatcagcgattatgacttgtcaatggcgaagaactcactggcacaggctcaggcacaactcgcccaggctaaagcacagctgaccacagcacaacaaaattactctttcacacaagtaaagagtccttcagacggtgttatcaacgacattccttatcgtttgggagcactcgtaagcccctctatggctacaccaatgactacagtatctgaaatagacgaagtatatgtatacttctctacaactgaaaaagaactgctggctatgaccaaaaccggaggaaccatcaaagaagaaatcagtaaaataccagccatcaaactacaattgattgacggcacaacatatgatgcagaaggaaaggtagacgctatcacaggagtgatcgaccagtcaaccggttctgttagcatgcgtgctatcttccctaacaaggagcatatgcttcgtagtggtggaactgccaacgttctgatcccttataatatggagaacgttatcagcatcccacaatcggctactgtagaaatccaggacaaaaagttcgtttacgttctgcagccggacaacacggtgaaatataccgagatcggtatattcaacctggacaacggaaaagaatatctggtaacttccggactgaaccccggcgataaaatcgtaatcgaaggtgtacagagcctgaaggacggccaaaaaatacaaccaatcacgccggctcaaaaagaagcgaactatcaacagcatttgaaagaccagcacgacggaaatttagctacagctttcaactaataatttagataatcgtatgaaattagataaattcattaaccgtccggtactatcaacagttatttccattttgatagttatcctaggtgctatcggattggcaacactgcctatcacacagtatccggacattgcgcctcctaccgtatcggtaagagccacatatacgggtgccagtgcatcgaccgtattgaactctgtaattgcccctctagaagagcagatcaacggtgtagaaaacatgatgtacatgacttccaacgcatccaataccggttccggtgatatctcgatctacttcaaacaaggaactgatccggatatggctgccgttaacgtacagaaccgtgtttccatggcacaaggtttgctacctgccgaagttaccagaattggtgtgactactcagaaacgtcagacatccatgctggtagtattctctctttacgatgaaaccgatacatatacagatgctttcatcgagaactatgcaaaaatcaacctgattcctcaggttcaacgtgtacagggtgtaggtgatgccagtgtgatgggtcaggactactccatgcgtatctggctgagaccggacgtaatggctcagtataaactgatccccaacgacgtatctaccgctttggctgaacagaatatagaagcggctccgggacaattcggtgaacgtagtaaccagactttccaatataccattcgttacaaaggacgtctgcaacagccggaagagtttgagaacattgtcatcaagtctctgcctaacggtgaggtacttcgactgaatgatattgcggagattcagctggaccgtctgggatataactttaccaaccgtgtaaacggacacaaagctgtaacctgtatcgtttatcagatggctggtacaaatgctacgcaaaccatcactgatatccagaaattattggatgaagcatccacaacactgccttcgggattgaagattaacgtttctatgaacgccaacgacttcttgttcgcttctatccacgaagtgttgaagacattgatcgaggcatttattctggtatttatcgtagtatatatcttcttgcaggatttgcgttctaccttgattccgaccattgctattccggtagcccttatcggtacattcttcgtactgtcactgatcggattcagtttgaacttgctgaccctgtgtgcccttgtgcttgccattgcgatcgtggtcgatgatgcgattgtggttgtcgagggtgtacatgccaagctcgatcagggatatacatccgcccgtctggcatctatcgatgcgatgaacgaattgggtggtgctatcgtatctatcacactggtcatgatgtccgtgtttattccggtaagtttcatgggtggtacggcaggtacgttctatcgccaattcggtttgacaatggctatcgctatcggtctgtccgcattgaacgccttgacactgagtccggcattgtgtgccgttcttctgaaaccgcatactgatcatggagataagaaacaaacacttgtttctcgcttccacacttctttcaatgccgcttatgactctatattaaagaggtataagaaacgcgtactcttctttatccagaaaaagtggttgtcaatgggactggtggttctctctatcgtattgctgatcttctttatgaacactactccgacaggtatggtccctaatgaagataccggtacgctgatgggagctgtaacactacctccgggtacatcacaagaccgctcggaacaaatactggcacgtgtagacagtctgattgctgcggaccctgccgtagcttcacgtacattgatctccggtttcagtttcattggtggtcagggaccgtcttacggttctttcattatcaaactgaaagactgggatgaacgctccatgattcagaactcagacgttatcgtcggttctttatacatgcgtgcgcagaagattatcaaggaagcacaggtattgttcttcgctcctcctatgatccccggttactcggcatctacggatatcgaggtgaacatgcaggacaagacaggtggtgacctgaacaaattctttgatgtagccaacaactacaccgcagcattggaggcgcgtccggaaattaactctgcaaaaacgaccttcaacccgaacttcccgcaatatatgattgatattgatgcggcagcttgtaagaaggcaggtatcagcccaagcgatattcttagcacgatgcagggatattacggaggtttgtacgcatccaacttcaaccgtttcggtaagatgtaccgcgtaatgattcagtcggacccgttatcacgcaagaatctggaatcactgaataatgtcaaggttcgtaacaaccaaggcgaaatggctccgatttcccagttcatctctgtagagaaggtatacggacctgatattatcagccgtttcaacttgtatacttccatgaaggtgatggtagctccggcttccggttatacttccggtcaggcactggctgcactggcagaagtggccaaagaaaaccttccggcaggttacacctatgaactaggaggtatggctcgtgaggaagcacaaagtagcggcagtacgactggtttgatctttatcctttgtttcgtattcgtttatttgctgttgagtgctcagtacgaaagttatattcttccgctagccgtattgttatccattccgttcggtttgctaggcagcttcctgttcgtcaacggaatgagcgcgatcggtagtatatcggccttgaaaatgatactcggtaccatgtccaacaatatctatatgcagattgcgttgatcatgttgatgggtctgttggcaaagaacgcgatcctgattgtagagtttgccctcgaccgtcgtaagatgggtatgagcatcacatgggcagccgttctgggtgccggtgcccgtctccgcccgatcctgatgacctcattggctatggtagtcggtctgcttccgttgatgttcgcattcggtgtaggtgcccacggtaaccgtacactgggtacagcttctattggtggtatgttgattggtatgatctgccagatcttcatcgttcctgctttgttcgtaatcttccagtacctgcaagagaaggttaaaccgatggaatgggaagacatcgacaatacggatgccgtaactgagattgaacaatacgctaaataatgaaattcgatatgaagaaacagattctatatatgttgtgtgcaactgctctcctgagcagctgccacatctataagtcgtatgacagacccgaagatattaccgcttccggcctgtatcgtgatccggcagcggacaatgatacattagcttcggataccaccaacttcggtaacctgccgtggagagaagtcttcaccgacccacagctccagtctctcatcgaacagggactgaaacaaaacactgacctcctttccgctgcattgaacgtcaaagcggcagaagcgtctctgatgtcagcccgactggcttatgcaccgtccatcggtttgtctccacagggaacaatcagcagttttgacaagaacgcagcaactaaaacgtactcattgccggttactgccagttggcaagtagacctgttcgggcaactgctgaactccaaacgaaatgcacaagtcaccctgaaacagacaaaggcttatcgccaggctgtacagacacaagttattgccaacattgccaacatgtattataccttgcttatgctcgaccgccagctggagatcactcaggctacggctgaggtactgaagcgtaatgctgaaaccgtacaggcactttcggaaagatcgacctacacatctgccgctttagcacaaagcaaagctgcctatgcacaagtagtggcttccatccccgacatcgagcaaagcatccgcgaaacggaaaatgccctgtctaccttcctgggagaagctccgcacgcgatcaaacgtggtgtactggaagcacaggcacttcctgaggaactttccgcagggattcctttgcagttgttatctaaccgtccggacgtaaaagcagccgaaatgtccttggcaagctgctattataatacgaactctgcccgtgccgctttctatccgcagatcactctcagcggttctgccggatggacgaacagtgcaggttccgccattatcaatccgggtaagttactggcttccgctatcggttcactgactcagccattgttctaccgtggtacgaatatcgcccgcctgaaagcagcgaaagcacaggaagaacaagctaaattatctttccagcaaacgttgtacaatgccggaagcgaagtcagcaatgcgctaagtttataccaaaacaccagtaaaaaggctgaatcccgccaaatgcaggtagaatctgcaaagaaggcttcggaagatacaaaagaattgtttaacttagggacgtcaacctatctggaagtattgtcggcacagcaatcttatctgagcgcacagatttctcaggtttccgactgtttcgacaagatgcaggctgtggtcagcctctaccaggcattaggcggtggaagagaagattaactttaaacatatactattatgattagtccgttagcttacgtagaccccgaagcgaaattaggcaagaatgtaactgtcttgcctttcgcctacatcgagaaggatgtggaaatcggcgatgactgtaccatcatgtcatacgccagtatcctgaaaggtacaaaaatggggaaaggaaacaaaatacatcagaatgctgtcctgggagcagaaccacaagactttcactatacaggggaagaaagtagtctgatcatcggagacaataacgatatccgtgagaatgtagtaatcagccgtgccacttttgcaggaaatgctaccagaatcggaaacgggaactacctgatggataaggtacacctttgccatgatgtgcagatcagcaataattgtgtggtaggaataggtactacaattgcaggagaatgctcattagatgattgtgtgatcctaagcggcaacgtaacgttgcaccaatattgtcacattggtagctggacacttgtacaaagcggatgccgcatctccaaagatgttcctccctacgtaattatgtccggtaatcctgttgcctatcatggagtgaatgcagtcgttctgtcacagcatcacaatacgtcggaaagaatccttcgtcatattgccaatgcttaccggttgatctatcaaggtaatttcagtgttcaagatgctgtccagaagattatcgatcaggttccgatgagtgaagaaatcgagaatatcgtgaatttcgtaaaaggttcggaacgtgggattgtgaaatagacaaaatacacttttcatagagaaagggtgatgtctttttacggacatcacccttcttatttattcaaactccagcgtaccgaagaagtcgggacgatggaagtccggtttctcaatctttatcggattccatgacaggaagtgaggggtttgcagttcatccccgcatttatagaaattcgctttaacttcctttccatccagtgactgtatctgatgcttgaagaatgcagcataaggaataatcaaggctacttcccaagtcgtatcgtccacacgttcttcgaagggttcattgcccagactggaccaacgctgcacgagagccgtcacttctttcggagcgtgttcccgaccgttacgggctggtccggcaccgatcagaatcgttccgatgcagttacattctatattataatagattccgtcactggccggaacagagaaaaactccacacaggaatcagtccatacagatccattgtcttctccatacttggcacgtacactttcttctctgactttgaagtgtaacagaatagaatctttggtatgcgcaatccggaaacttacttttggcttgtaaggatattcagcccagttgacacactgaaccggctggaaatctatcttttcctcatcaaataatttaggaagcgaacaagcctctacattagcagaactaattttctttactttcatatatctttcgtttggaggatacaaatatagttactttctcctaataaggttcccgaaaatcaaataaaaacaatatatttgccattagtaataccctaaacaaccgaattagtgagaaaaacaatccttttatttctgctatttttaagcgtaactgctgtccgtacgttaggacaaaatattactttcagccatttgaccacagatgacggactttcccagttttccgtcaacagcctgtacattgacgaacggggcattatatggataggtacgcgcgaaggactgaaccgttataacggtaacgatatcaaaagtttcaagctcaagaagaatgatccgaacagtctgttcagcaataccgtactccgtatcacaggtaataagaacgggaaggtttacctgctttgcaccgacggtgtagccgaatttgacatgaccactcaacgattcaaaaccctactgcaaggcaatgtggacgctatctactacaacgaaaaactatatatcggaaaaagagaagaagtattcgttttcaacgagaacacgaacaacttcgacctttactaccaccttgccgggaaagacattaacctatcctgcctccatctggacgagaagaaaaacctgtggatgggaaccaccagcaatggtgtttactgcctgtcggacgacaagcaactctctcagcccatcacgaaaggaaacatagccagcatctacgaagactcatccaaagaactgtggattggcagctgggaggaagggctctaccgtatccgcacaaacggcactatcgataacttccgccacgacccgaagaatccgaacagtatatgttccgattttgtcagaagctgctgtgaagataatctgggaaatctatggatcggaactttccacggcttgaaccgctacgacaaaagcacaggacagttccaactttataccgccaatgacaacaaacccgacggactcacccactcttccatctggtgtatcgtgaaagacgaacagggaaccctatggctgggaacttactttggcggcgtcaactacttcaatccggaatatgaaatctatacccgctataaagtgggagacacggagaaagaaggattaagcagtcccatcgtcggcagaatgacggaagacaaagacggtaacttatggatctgcaccgaaggcggtggcgtgaacgtctacaaccggaaaaacaatacttatcgctggtaccgccatgaagaaggcaggaacagtatctcgcacaacaacgtcaaggcaatctattacgaccggacagaggagattatgtggatcggcacacacttgggaggactgaacaaactcgacctgcgcaccaaccgctttaccgtttaccggatgaaagcgggcgacccgaccacactgccctcggacattgtacgcgacatcgtgccctacgaagacaaactgatcatcgccacacaaaacggagtctgccttttcaatccggcaacaggcacctgcgaacatcttttcaaggataccaaagaaggcagaaatatcggtatggtggccagcctctacatcgacaaggacgaaacgctatgggtttccgctaccggagagggcgtatattcttaccgcttcgacaccggcaagctcacccactatgcacacaatccctccattccgaacactctcagcaacaacaatgtcaacaacatcatgcaggacagcaacggcaacctgtggttctccacttccggaagcgggctcgaccgttaccgcaaggagagcaacgacttcgaaaacttcgatatgcagaaagacggactatccagcgactgtatctacgaagtattcgagtcgtccatacaaaagggagacttgctgctgattaccaatcagggattctcccagtttgactatccgcaaaagaagttttacaactacggtacagagaacggattcccgctgactgccgtcaacgaaaacgcattgttcgtaacgcatgacggagaagtatttctaggcggcatccaaggcatgatttctttctgggaaaagaaactgcactttacgcccaagtcctacagcatcatcctttcccgcctgctggtcaacggaaaggagatcactgccggagacgacaccggcatcttggaacagtccatcgcctatacaccggaaatcagcctgaaagccgaccaatccatgttcagcatagaatacgccacttccaacttcatccctgccaacagaaatgaaatcgtctaccgcctcgaaggtttctccgacgaatggaatcacaccgaccacaaacagacgcttatcacttataccaacctgaatccgggtaaatatacgctcgtcatcaagtcggacggagacggtatcgaagaagcccgactactgatccgtgtattaccgccttggtatgagacatggtgggcttatctgatttacaccatttgtaccgtcagtctgttatggtatctcattcagaactacaattcccgcatcaaactgcgtgagtcactgaaatatgaaaagaagcacatcgaagacctcgaagcattaaaccaatccaagctgcgcttctttaccaacatctcccacgaattccgcactccgctgacgttgatcgtgggacaggtagaaacgctgttgcaagtacagacattcacacctaatatttatcacaagatattgggaatttacaaaaacagcctccaactgcgtgaactaattacggaactgctcgacttccgcaagcaggaacaagggcacatgaaaatcaaagtcagccgacataatctagtgaacttcctgtacgagaattatctgttattccttgaatacgccagcagcaagcaaatcaatttcaagttcaacaagcagtcggatgatattgaagtatggtacgaccagaagcagatgcagaaggtagtgaacaatctgctgtccaacgcattgaagcatacgaaagcggaagataccatctccatcaacgtatcgcaggagaataaatacgtcattatcgagatcaaagacacgggaacaggcattgccgccgccgagatcgacaagatattcgaccgtttctaccagaccgaacgcctcgactcgctgaataccggagccggcacaggcatcggactggcgttgacaaaaggtatcatcgaacttcatcacggaaccatccgtgtagagagcgaaccgggcaagggaagccgttttatcattacgttgaaatcgggcaaccagcactttactgaggaacaaatcatacgggacaacaccgacaccaacattcagcaacaaccggaaacaatcgttccaaccgtagaaatactgcccgattccgaatggaaggaggaagacaacaaacgcatcgaagatgcgaaaatgctgatagtggaagacaacgaatccatcaagcaaatgctggcaggtatcttcgaaacgttctatcaggtcaccaccgcttccgacggtgtagaggcactggatatcatacagaaagatatgccaagcatcatactgagtgacgttgtcatgccacgtatgtcgggtacggaactctgtaagcaaatcaaaacggacttcaacacctgtcacatcccggtagtactactgacggcacgcacagccgtggaacacaacattgaaggattaaagatcggcgcggacgattatatcaccaagccgttcaataccaatctcctgatctcccgttgcaacaatctggtgaactcacggcggttgctacaggagaaattcagcaaacagccacaggcttttgcccagatgcttgccactaacccgatggataaagaaatgctggaccgtgccatggccatcatcgaacggcacttggataatacggactttaatgtcaacatcttcgcccgtgaaatggggatggcacgtaccaatctgttcacgaagttgaaagccgtcaccggtcagacaccgaacgactttatattaagtatccgtctcaagaaaggagccgtcatgctgcggaacaatccggagctgaacattacggagatttccgaccgcatcggtttctcttcttcccgctatttcagtaaatgctttaaggagatttatcacgtcagtccgcttgcctaccgcaagggtgaagaaaaagaggaagaagggaacgaagaaacggatcaataacccacaaacaggtaagcaagtagcatttgtaacaggagaacctatgccaaagtagttccctcctgttggcacacttgtgccacgctgctggcacgaccgtgccatcgcggtggcacagctgtgccaacagcgtggcacaagatccgggctacgatgtcaggaaaaggcatccgtagccccgaaacatttaaccctttagaatggactattttgtatcacacctgtacattcctgctcactcatttccgccaatcctcttatctttgtgttcagtaatcactccataaaagatcaacattatgaagaatgtctcacgtttactaccgctattgcccggtatagccctgctgaccggatgcaatcagaaagtacaaaaagacaacggacaaaactcacaaaagcctaacattatttatatattcgcggacgaccttggcataggtgaccttagctgctatggagcaacgaaggtcagtactccccatatcgaccgccttgccggacagggtgtacagttcaccaacgcctatgcaacttccgccaccagtaccccttcccgcttcggactcctgacaggcatgtacccgtggcgacaggagaacacaggcatcgcccccggaaactcggaactaatcatcgacaccgcctgcgtcaccatggccgatatgctgaaagaagcaggttacgccaccggagttgtcggcaaatggcatcttggactcggtccgaagggaggcaccgacttcaacggccacatcacccccaacgcccaaagtatcggcttcgactacgagttcgtgattccggcaaccgtagaccgtgtcccctgtgtattcgtcgagaacggacacgtggtaggactcgacccgaacgacccgatcactgtgaactacgagcataaagtaggcgactggcctacaggcgaagagaatccggaactcgtaaaactaaaacccagtcagggacataacaatacgataatcaacggcatcccccgcatcggttggatgaccggaggcaagtccgctctctggaaagacgaagacatcgccgacatcatcaccgataaagcaaagaactttatcgcctcccataaggaagaacctttcttcttatatatgggtacgcaggacgtacacgtaccgcgcgtcccacatccccgctttgccgggaaaagcggtctgggaacccgcggagacgtaattctgcaactcgactggaccatcggagagatcatgaacaccctcgacagcctccagctgacggacaacaccatcctgatattcaccagcgacaatggccccgtcatcgacgacggctaccaggaccaagccttcgaacgcctcaacggacataccccgatgggtatttaccgtggtggaaagtacagcgcttacgaagccggcacccgcattccgtttatcgtccgctggcctgccaaagtgaagccgaacaagcaacaggctctcttctcgcaaatcgatatctttgcctcacttgccgccttgttgaaacaaccgcttccggaaggcgcagctcctgacagtcaggaacatctgaacacgcttctgggaaaagacgacaccagtcgtgaatacatcgtacagcaaaatctcaataatacgctcgccatcgtgaaaggacaatggaagtacatcgaaccgagtgacgcccccgccatcgaatactggacaaaaatggaactgggcaacgacaggcatccccagctgtacgatttatccgccgatccatcggagaaaaacaatgtagcgaaacagcatccggaggttgtcagagagttgtccgaactgcttgaatcggtaaagacaagataaccaatgagaatagcagatttgtattattttgtatcaatcttgaataattctatccatatgagaacaatcaatgcgtatatctttgccatcgtaaattcaacaaaatcacttaatttttaatatatgaaaaaacatctatccaaccagacaagaaaaaggatgctctccattttgggaatgctcctgctttctgttccatttgtgcttgcacaagtacttgtcaaaggtactgtgaaggataatctaggagaaggtgttcccggagccagtgttcaggtaaaaggcacttcgcagggaacgatcaccgaccttgacggtaaattcactcttaacatcccccaaaagaacgctaccttggttatctcctttatcggctacgtcaccgtagaacaaaaggcggactcgcaaaaaccaatggtcatcacattaaaagaagatactaaaacgctggacgaagtagtggttgtcggctatcaggaagtacgccgccgtgaccttacaggttccgtggcgaaagccaacatggcggatgtacttactgcccccgtcgcttcattcgaccaggcactcggcggacgtatcgccggagtcaacgtaacctcgggcgaaggcatgccgggcggcaacatgagcatcgtgatccgtggtaacaactcactgacacaagaaaactcgccgctgttcgttatcgacggtttcccgatagaagattcatcggcagccagcacgctgaacccttccgatatcgagtcgctcgacttcctcaaagatgcgtcggctacggccatttacggtgcgcgcggtgccaacggtgttgtcatcatcaccaccaagaaaggtaaggtaggacgggcacagttgtcctatgacggtagtttcggtgtgcagcacgtcacccgcactattccgatgatggatgcttatgagtttgtcaagctacagaatgaaatgtatcctaccgtcgttgccggctcatacctgatgaactacgaaggcaagcaatggacactggacgattataaagacataccgcaatataactggcaggacgagatattcaagactgcctggcagcagaatcatacggtcagacttgccggtggtacggaaggtgtacgctacaatgcttccttatcttacttcgatcaggacggtacgctgatagaaaccggttacaaacgtatgcaaggacgtatgaacacagtagtccgtcgcggcaaactgaacatgagcctgaccaccaactattcacgctctatccaaacaggtagtactccatcatccacctcttacagtggtatgaacaaccttttctatagcgtatggggataccgtccggtgacttcccccgacactccgctcagcttcctgatggacagttcaacggacaacgccgtagattcaagcaacgactaccgtttcaacccgatcaaatcacagaagaacgaataccggaagagctacaccaacaatcttcaaatgaacggattcgcagaatacgaagtactgaaaggactgaaactgaaagtttccgctggatatacttatgattcacgcaagcaggatcagttcaacaactcgaatacccgctacggaggtcctacctctacagataaagtgaatgctcaggtaacccgccaggaacgcctgacatggctgaacgaaaacaccctgacttatcagactaacatcaaaaagaaacacttcctcaatgtattgggaggtatcacgttccagaactcggactatgagatttattcattccgcacaacgcacatccccaacgaatcactcggtatggcaggcatgagcgaaggacaggcaggtactaccacttcggcaaagtcttcatgggcgatgttatcatacctcggacgtgtgacttacaactatatgtctaaatattacgctaccgtttctttccgtgccgacggttcttccaagttcaacaaggacaaccgttacggatacttcccttccggttctctcgcatggagcttctcggaagaagaatttatgaagccgttgaaaagtgtactgtccagcggtaaggttcgtttgagctggggactcacgggtaacaaccgtatcggcgaatatgattattatgcgctcctggcggtattgaaatcaagagtcggctcgtatacatcgacaaactccctcccaagcggcgtctatccattcgacaatgatgcgacgaatgcaggtgttgttcctacttctctgcccaacaaggatttgaaatgggaaacaaccgaacaatggaacgcaggtctcgacctcggattcttcgacgaacgcatcggtataacgatggatatttaccggaagaccacccgcgacctgttgctggacgcttccctgcctttttcttcgggttattacagcgctaccaagaatatcggtaaagtacgtaacgatggtctggaacttagtctgaacaccgtcaacttccagacacgcgccttcaagtggacgactaacttcaacatttcattcaataagaataaagtactggcattgtcggagaatcagacagccttgctgactgccgcgcaattcgaccagaactacaacggtcagtccagctacatcgccaaagtcggtctgccgatgggactgatgtatggttatgtctatgaaggtacatacaagtacgacgacttcaacaaatcgggtaactcatacagcctgaaaccgggagtgccccactactctactgagaccaacactcagccgggtatgcccaaatatgccgaccttaacggagacggagtagttgactccaacgaccgtacgattatcggacgcggacttccgatacataccggtggtttcaccaacaactttgaatataaaggcatcgatctgagcgtcttcttccagtggtcatacggcaacgatatcatgaatgccaaccgcctgttctttgaaagctccaacaaccgttcacgcgaattgaaccagttcgccagctatgccaaccgctggacaccggaaaatccgaccagtgacatccctgcggctaccaactcctcttccaaccgtgtgatctcttcacgcatcatcgaagacggttcgtacctgcgtctgaagaacgtaacagtaggctataccttccccgccaagctggtgaagaaatggaagatagacaaagcacgtgtttacgttgccgcacaaaacctgtggacatgtaccggttattccggttatgatccggaagtatctgtacgcaacagtgcgctcactcccggtctggactactcttcctatccgagagcatactctatcagcttcggtgtaagcctgggattctaaacggataatgatagtaacagttagaaaaaagtattcgattatgaaagcattaaaaataacaatcatagctctattggcaggtttcagcatggcatcctgtgactttctggacaaagaacctaccaaactgacgccggagaactacttcaacacccccgctgaagccaactccttcctgacaggcatctacgccatactgtcgcaacctactttctacggcggcgactatatgtacctcgtagccggtgacgacttatcccactacggaggcagcggacgcggtcccgcatctaccggactgatctgcaacaacgccaccaccagtgacaacgccgtgactgccttctggtatgccctctattcaggcatcaaccgtgccaatatgttcctcgaaaacatcgacaaagtaaacggtttcgatgcaggcgtcaaagaacagtacatcgccgaagcccgcttcctgcgtgcattctattatttcaatctggtagagtgctggggagatgttcctttcaaaacggtttcgacccaaagcgttaccaacctgaacatcccgcgtacggacaagcaggaaatctatgacttcatcatctccgaaatggcagatgccgccgagactggtctgaaatcggcctccgatcttgcttacaagccgggacgtatctctcagtctaccgcatggggcatactggcacgtgtatatctgttccgtgcaggcgagcattaccgtgaaggtcgcaatgccacacaggccgaaaagaaagactatttcgaaagagccagcttctacgcccagaaagtaatgactgccggtcacaaactggctgccaactactgggaccctttcatcgatatgtgttccgacaagtataacaccactgccaacgaaagcatctgggaagccgaatttgcaggcaacaacacttcggatacacaagccgaaggccgtatcggtaacatcatcggactcgccggtccggatctgtcctccaaaagcgatgtgacgggagccaaagaccccggatatggctatgcctttatctacagcactccgaaactgtacaacctttatgtgaacaacggtgataccaaacgtttcaactggagtatcgctccgtttgaatacaaagaagccggaggcaagaatactggcgttacccatcgtgaatttgagcagggcaaacttgctgaagtaatgtctcaatacggtcagcaacgcggaacttaccagtacgcagatgacacagaaaagaccacagccaccaagaacttcagccgtatgtgcggcaaataccgccgtgaatacgaagcggataagaaagacaagaactatacgtctatcaacttcccgatcctgcgctatgctgacgtactgctgatgatcgcagaagcggaaaacgaagcgaacaacggccctaccactctggcttaccaatgtatgaaggaagtaagagaacgtgccggactgaacgagcttcccgacatgacgcaggaagaattccgccagaccgtgaaagacgaacgtgccatggaactctgtttcgaatacacccgccgtttcgacctgatccgctggggtgagtatgtgaagaatatgagagcattggtaaccgaagcacaatccggcaacaactggacgcagggacctaccaacgtatatacctacttcaacatctccagcacttacaactacttcccgattccggatgcggaaatgagtgtgaacaaagatatcacacagaacaatccgggttggtaatcacagtattcatcgataaaagtatcatagattatgaaaacatataaactcatagccatctgtatagcaagcctcttctttggggcttgcagcgacgggctggacgaagcggtaggtctgcacgtaaaagtagcgaccaacgagaatgtaagcttcgacggacagatcattactgccaaaaaaggtactccgatagagttcatcctttcgggcgatccggacttcctgacattcttcagtggagaagcgggcagcaaatacgaatatcgcgaacgcgaaacgattgatccttcacagatcaagtcgtctatgctgaacttctctatctggttccagtacggtaacccgagcacgacattggagaaacacgtatatatctccgacgaattcaccggattatacaaggataatttcgaagctgactctttgcttgtagagcaatttgagaaagacggtaaatggaaagaactggttccgcagtccgcattcccgacagcagcggtaggcaatgccgatcttgccactccatacagttttgatatgaaagaatacatgggcaaacggattgcaatcgctatctgctaccgtggcattgacaatacagtggcacaatccaagatgtactttgagcggatgcgcatcaataatgtgatgacgagcggacaggaagcagaatattctgccggttctttcggctttactccgatcaatatgaagaacaaatggaatctgaaggatcagaccagcatgaccaaagaccgtgaatacgggacagttaccaataacgtatccggtatctggaacctgacaggtgtaggcggcggctccttcttcatccatagtacgaatgccaacgatccgctgaaatacagctggctggtttccgatctgattaccgttaactcttgcagtcccgatcagggaacgaaagtaaaggatattacccagcgtctggataagtacacatatacctacaatcaaattggtatctacaacgtgacattcctcgctcgtaatgccaatatcgatcattcctccacgactacttaccacatggtggtaaacgtagtggaataacaataaacgaataaaataataattaatacattatatctatgaattactttaaatcaatcatgttaaccgcatttgcgctgtttgcattggcagcgtgcgatacagacgacttgagagacgatgttgacaatctgaaagaccgcgtagagtctttggaagcgcaagtcagtctattgaacgataacatgacagctatcaagcgactgcttgaaggtggtcagactatcacagaagtgacgaatacagacggtacatataaactgaaactgagtaacggagaaaccatctcactgacacaaggctcgaagggagaagttgcttatcctgagattactgtcaatgacgagggtcaatgggtagtgaacggtgaggtattgatgcagaatggcatacctgttcaggctgtgggcactcccggtaaggatggtatagctcccaagttccggattacggacgagggaagtttctggcaggtaagttatgataacggaaccagctgggaagacgtactcgatacagacggtcaaaaggtatccgcagtcagcaatggttccggaggaagcagtgcagactctttctttgaggaagtatacgtagattcaaccggggaattcttcgttgtcaaactgaaaggacagacggaagccatctctatccctatcgtaaaagacttgctttgcgaaatcaccgaaccggaaaccggaatgaagaacggatactgggaaataggctatggcaagactgccactacgactgtaaaagtgaaaggtgaaaacattatcgttactgctcctgccggatgggtggctactgtgagcgaagcggatgaaacgaccaatgtagctacattgagcattacagctccggcaaacgcaatgagtacacgtgcaacggcggataacggttccgacgtaacagtgcaggttaataagggtgccagttgggcggttgccaagattcaggtgaaggctgtagaggtagttgacagctactacgaactttacaacgcaggaggaactatcgaaataaacggaatcaaaatacaaaaagatggcgcagatggatatggagaagcaaccttgattacttccgagtctgaaagcaaggaaatcagccaggcaggagtttacttcatcaaaccgggagttgaaattacgtatactggaaccggaactctcgataacctagttcttatcggagacaatgcagagcaaaaggttaaatgtattgtcagcaaacctattatcttaggaacagcaagtgctaagggagctttcattatgaatatcaacatggatgccagcacacttgccaactatgtattctcaattacaggtaatctttctcatctggcattcagtaatagcgaattttctgtgtatgaagccagaaatctggttaattgtgcagccgataatgcaggcgtatctgaaaatatttctatcattaagagcttagttaaatttaatgtgactaaagattggacagcttcacgcgtattaaacttcaccaagggactcacatgcacatctgtaacgttcgaaaacaacgtagtttatccttctacaatagaatatacgattaacggttgtctgctctttgcacaaggacagaatttggattcaaaagtgataatcagccataatacattcatcaattttatctctagttctcagtcccttgtaagagcaaacgtaaataacgatgttactttctctaacctcttattcttctataacgcaaactttggaaataaaaacgccacattaataaatgtaggagatggagctatcggaacattaacatttgcagataatattcgctataacaacggaacttctgtaatcaacctcaatccgttcggaggaaccgccgcccccggatacccaaacactgtagttcctttggcagaagcaaatccgttcgacggcggcaccttcgacctcgccaacggtatcttcgttccgaatgcagaatatgccgaatacggtgcaaccaactaataccgactaacgtatgaaaaaagtaatatcaatcatatgtatcaccctcctcgtcgcactttactcgtgcgacgaacgggatgatctgcgctccgacattgacaacctgaaagaacgggtagccaatctggaagcgagcatagaacagatgaactcggacatcagcaactatcagcagatggttgaaggtaagattttggtggtgggatatagcaaggatgagcaggacaattataccatcgaactgagtaacggtgaaaccataaccatatacagcggcaaagtagacatgaacgatatgcctttgttcagcgtcaacgcgtcaggtcactgggcatataccatcaacgacatgaccaccgaactgctcgttaacgacaaaccggtaagcgctatccccgaagcgggaacagcaggcgtcaccccgaaactgaaagtagatgcaaacggtttctggctgatttctatcgacaacggaagcacctggaacaaattgggcaacaaccagattgccgacggaacgcaagccgttgccaacgcaagttccctgttcagcaacgtaaccatcgacgaagcgaccggacagatcacctttaccatccgtgccgacaacagccaagtaaaagtccccatctacggaaaagacttctacctgacaatcaagtatgaaggcacagccactttcggtctgggacaaaagcaggagttcgtggtagaacaagccaacgtggaaacagccaccatcgaaaaccagacatggggcgtgaaactgacggaaaacaaactgatcgtcaccgcccccaaaacaaacgtgcaagggaaagaatacgaagaacagatttacatcaagatattctcgaaagaaggttactgccgggtagtgaaacttccggtaaaactgctgaccacgaagatagatgccaactcggcaatagcctggcaacacttcaagacaggagaaaacaatgtgctgcccgactattcgtatgccggatataatcatggagaaagtgcgccgcaaggcgcattttctttaggataccaagtgatcaacgtaaaagagcgcatgaccgccaagaacatgaccgcccgtgaagcgctgatcagcatcctgcaagagaaaggtatgacaaaagtaaacggaaccaacaagctgaacgctaacgcgaagattgtaatctatttccccgcaggcgactacgttcttcacaacgatgacgacaacacccgcgacgaaagcaagcagaaggacgccgttgactcgaaaaacaacaatgtcagcagtggcattgaaatctatggcggtaactttgtgatcaaaggcgacggtcccgacaagacccgtctgatcatggaaacgcctaatctgccgacaagtatcagcaatctcagttcatcacctatactgttggcaatcaagcacaccaacggtccgaacaatgccggtaactcccccaagctcgcttccgtaaccgagaatgccaagcgcggagactttaccgtgaaagtcagcggaaccaccggaatctcctccggacagtgggtacagttgcgcttgcgcagcggagacagggaactggtaaagaaggaaatcggtccgattgccctcaacgagaactgggcgatagcaaaagcccctatctccatcaaccaaagctccgacgacctgtacggagtaaaaatcaccgaatttcatcaggtaaaatccgctgcaaacggcaagatcactttctacgaaccgatcatgcacgacatcgacatcaagtataacgatacggaaggatgggaaatccgcacgtacaaatatctggagaatgtcggtatagaagacctgagcttcgtaggaaacgcattggacggctacgcccatcacggagaaggacacgccgaacaggctaaagtaggctggcaatacgacggagcctacaaaccgctgctgctgcaacgtgtagtcaattcatgggtacgcaacgtccacttcgagagtgtcagcgaagcgcttacttttgccgaatctgccaacagctcggcatatgatatccgtatcagtggaaaacgcggacattcagccgtacgttcgcaaggttcttcacgcgtctttatcggcaaagtccgcgatgaaagcgcaggaaatgacgtatacggaaagagttgtcaagggcagttccacggctgcggcgtatcgaagccaagtgtaggaaccgtattatggaacgtaacctggggcaatgacgcctgtttcgaatcccacgccacacaaccccgtgccacgctgatagacaattgcagcggcggacttgtatactaccgcgcaggaggcgatgaaaatgaagtccccaatcacttaggcgacctcaccctatggaatctgaatgtgaccggaacggattctcacgcttctaacttcgcatggtggagcgacagcgatacatggtggaagattttcccgcctatcgtagtcggtacacatggtatgaatgtgaaatttcccggtaaagagcagcaacaagtcacatacgaagaaagtaccggtatgaaggtatcccccgaatctttgtacgaggcacaattgcgggaacgtctgggctatgtacccggatggctcaacgcccttaaataacaaccaatcacccgcacgatttttctaaccttcagttaaaaacgtatatgaaaatcagactttaatcaatttaacacccaaaagagaggggccgtgaggttcctctcttttacttttccgtatctttgcagcaaattaaaagatatgcaaaatacactacccatccattttgctccgctgcaaggttacaccgaagcaatttaccgcaatgcacatgacgccttcttcggcggtgtagacacctattatactccgttcgtacgattggaaaaagggaactttcgccgcagagatgtccggggaatcgaacccgagaacaatggggtgccccacctgattcctcagttgatagcctcgtcggcagagaaagcagaagtgattttatcccttttcatcgaaaaaggatatcaggaagtggatataaacctaggctgtccgttcccgcttctggcgaaacgtcataacggctccggcatccttccttatcccgaagaggtgaaagcattgctcagcattgtcacccgatatccgcaaatcagcttctccgtcaaaatgagactgggatgggaacagccggatgaatgcctggcgcttgcccccatactgaatgacctacctctgcgccagatcaccatgcacccccgtctgggcaaacaaggttacaaaggagaaactgacttgcaaggattctctgctttccgggaggtctgccgacttccgcttgtttacaatggagacattcataatttggaagatattcaacgcatcagcgcacaattcccctcactggcgggaatcatgataggacgcggactactggcaaatccggctttagcactggaatacaaagaaaaccgtacgctcgcgcccgatgaaatgagggatagactgaaatccatgcacaaaagcgtgtacaacaattacgacgtactattggaaggaggagagggacagctactgactaaaatgaagaccttttgggaatacctggcgccccaaaccgacagaaaagtactgaaagcgattcataaaagtacgaatatcagcaaatattatcaggctgtcagtgccttttttaatcaacggtagattgataatcagttattttatgtaattttgcgcccgtttattaacaagcacattatgaaaaaatacattctattatctctctgcttgatgacactatcaagtagtttcgcacaattaaaggattttaaattcaaattctacggacagattcgcacggacttctactataacagccgtgccaacgaggaaactgtagacggattgttctacatgtatcctaaagatgaattgctcgacggcaatggtgaagacctgaacgctacatcgaacagtaatttctatacattatattcccgtttgggactggatgtggcaggcccgaagttgggaacagccaagacatccgccaaagtggaagtggacttccgcgggtcgggaacttcttactccaccattcgtctgcgccatgcatactttaacctggactggggaaagtcggctgtgctggtaggtcagacatggcatccgttgttcggtgatgtttctcctcagattcttaatctttccgtaggagcaccgttccagccgttcagccgtgcaccgcagattcgttaccgcttcaacaacaaacaccttcagttgaccggagcgttggtatggcagtctcagtatctgtcacaaggacctgccggtaaaagtcaggaatacataaagaagagcaacatccctgagatttatgtcggagcagattacaaaaacggaggatttctggcgggtgtcggcatcgaaatgatttcattaaagccacgtactcaatcttcatgggaagaaaagacgtttgatccgaccaccaatggtacgatatcaatcccacatacgtacaaagtagacgaacgtatcactaccctctcttatgaggcccatgtaaaatataccaataaaaattggttcatcggcgccaagagcgtattaggttccaacctgacacaagcatccggtttgggaggatttggaattaagcacatagacaacaagacaaaagagcaggaatacactccgatacgcttctccagttcctggctgaatgtggtctacggacagaaatggaaaccggggatctttgtaggatacgccaaaaacttaggaacaagcgacgaattagtctctgaaaaactctatggtacaggaaccaaccttgataaactggtaactgccggagctgaacttacctacaatgttcctcactggaagttcggagttgaatatacattgagttcggcatggtacggcaagctggataaatcggatggtaaaatcatagacacccactccgtcagcaacaaccgtatcgtagcagtcgctatgttcatgttctaatttgcagaagatcattcaacagaatttaagttcctacatcattttaaggccgactaaaaagtcggtggtatcttaaatctcctccttcgggaaggaggagtacccgcagggggaggtggtaggtgaatacacgattctttcattcataatcaattagagacaaccttattttacctaccaccccggctttcagccacccctccttcccgaagctaccctttatacacaagtcttatctgataaactcatacagttcaaactgtgtataaaatctatccagtccattcttaaaggttatatatcctggaatggactggctcttgtatgcactccatgctcctaaccttgcaataatccatgctgcccatgccattgattcttttttatatggattttgctgtatttttgtatttccctcactcttttttcctactatatgtaataatgctatttctttgcttgtaaagtagatttctgaagagagtttttcatcttctttatcaaaagaaagtttgagtaccatcacctgcagggctgcctgcaaggaaattaagattagtttttgtaatgccgaaactgtttccaactgtgcgtcctcaatcatgaatccctttcttttgagcactctgaacaactcttcaatcagccatctacaacgataccaaccgatacattcaattgcttgttctacagtctccaccacatgtgtagttagcagtctccattcaatagggctctcatttaccggtgtactggaagatttttctttaacatgtatgcaataaagactaacagggggactgccctttgccggaccgttaacaggagcgcacaaagtgactctttcaaagcgaagttccatgcacgctacccgtttcttacgtccgcttcccgggagcacttcaaagctatactctgcccgtagaacagcctgctccattaatgtattcagatggacagaacagtctggatcatccaaccggcaattcctttcatgaacagaacgtatcagcaagtgaacattatcagtagggatacggctgaaaagctcgaaaatgtccgcttcacggtcaccgatgatcgttttaactgcatcccggggcatttgctcactggcagccattccactttctatccaacgatatgactctttttcttctataggctgatatctgtaattacgttcttcacgacttaaagcagccggtgagcgattccactgcttaaccgaagaaaagcctataggaatatgactggaggcatccactaccaagacaggatgcaaaaaagtaccacattgcttttgaccgacaatgccgggactggctgtttttttcttcattcgctcaacatgagcctcatagtttatctccgaggtatcttgaatacacagtaaatgcttacgaccggaagcattcttacagcaagtgtgtatcagacctgataagatagcatcagagctgactgaggaattgttcaaaaatctataagcacccatcttttctttatgttccttactaaattgattcactatagcactttgatggacaaccatctgagagcaaattaagtttaaacgccgcaaaagccgaggatcacgaatttgatctgtctctaataacatcaagcaaagataaaaaaaataatatatacttgtgtataaagggtagcttcccgaagggaggggaattaatgatactattgacttatttgtcagtcgcaatttgtttcaaaaagtttcaaggcgtgaaacaatcaggagaaatactcgattaggatgatttgaccgcccgatccgatgaactcaaccgtatcagttgtttcaattgacctgttcttttaggaagcattaaatcatttattagtcaataatggatgatctctcagtcattaatagctgatttctcaattattaatggctgagagatcaaacgttaacagttgagaaatcagctattaacatcctgtaagtcaaaagataacattgtagaaatgagacagatcaggatgagacagagtgagagcaaccgtttgccctcatacctgccaccacagttgctaccacaccgaaaaccacgatgaataaagggatacaggccatctgttagagcatgagagcaaaaacggctatcaaatcactgtggagagcctaagctgatatgtaggctcctcagctttcattgctgctattacagccgattcctttggccgtaaatgctctaggggggatctgattattcagatagcataccacagaacaaaagattatttctccagttctacctcatagctggctccatccttacagaggaagcggagtaccgtttgttttttatcctcggataccactttgcagaaaggagtctccgctaccttccacctgcctttcagagttaccgtcacaggaatctcaccgctttcattgtcaatccacgggcgggaatagatgctgcgctccatacgttttccgtctttatcgaaagcctcatcactcggaccacgatacaatgccagatccggttgagctacagtcaataatactttatcagcagattccttacggaccatcactaagcaggacgtatccgtacgctgcaataatccaccgggaagcagtgactggggagtttcaaaaagcacataagaagttatcttatcagaaggcgattcaaggatatgtgcattccggtcttgctgtaatacgctgtaggcaggcttctttgcaaaggcagtcatcgtcttccggtcggttcccggcagaatggcatattcgtagcttcccgctttcggtgctttcccatggtcgataatcaatgatacccagtctcctttcgtttctttgcctgtatcctgcatacgggagtattgtggaaagtttttctcgaatcttgcagcaaccggcacataatatccggtacccagatgatccatccatacttttccttcacccgcattattcttccaatagtcatgtgcctctttatctgtcaccgccagttggaagatggtcgtctccgttggatagtccgtgtttgtattcttgatatccgagcccagacaaacgatcattccatcgatgaaatggaaggattttcgcgcacgatgcgttccgttatacttatcgtgttcgtgcagtttcattccgaagttaccattcatctttccttgtgacaggccgccggcaaaggcttcatccgaataaagcatctcttccattccggagaatgtatctacattcagcacgttggctttgagcaggtccagcgggagatggatggaagtcactcccggaatgcggttccagtcgaaaccttcctgctgccatccgctggtggcgggagtcactgtctgtcccggaggtgctgtcagtatctggagacttccatgtgccagatagcgtccatagagattgtgtcccagataatgttcggctgcccaaaggtagcgtgaatgtccgcgtgccacggccgaccagttttcacgccgttgcacggatacacagccatagcccagcgagagattaccctgcggatcgggttcggcacgaaaaccgttctctaccagtcgtttggcaatcttacgctcctgagcgttcgaaactttcggcatatattccggtgcctgttccgcagcagaggaatcggaagatacgagacgcaggtaggcggatgccatctctttatcaaaatcgccctttccatcgggagttccggcaattgccatcatcgcatagtgcatgggaactaatttcccctttccatcgggatggcgcccggacatagacaagggaaagttcagtttattgcagtagaaacgcatggcaagcaggacatctttgactgtccggtgtgccaattcggaaacggcaaggcttgtccgactgaaaagataaatcatattcgttgccccgtccagtcctccaacggcataggcagggtagttattacggtgatggaaagctcctccgtccactttgaaagaaccggccagtcccggtgcaggacggcagccgtagtcaatccatcgggagaaggatttcaagtattgcagcttctccggcgtgtcttccatcatcagaatgcttgcgatacgcccggtggtttgtgtattgaaagaatccatatcgatgccgttgccttccggtttgggatatacctcgttggtgatggcataccagcgcaacgtacgctccgcttggagcagttttccttcttcccgcaatacatctttcatcaggaaataagccggataaagtccgcgcacgctatatccgtaatgatgaatattgccccagcaactaccgtaagccactccctgatcggtgatatggtcgtacatcgcaaggaatttccgcctcatctcctcgcggatcggagatcctgcctcactgttattgtaagccacggcaatccgtttcatcaagtcaaaataagcacgcatctctattcccatcttggtcagcatatccttgtcccagtccggaatcatccgttcgtaggcttcggaagcgcgcaccatgaaaacgggcactccggacacttgcccgtccttataggttatctgatagaggtcgtatttcttacggatggtttcggcttctttctccgtcaccttccctttggtatagatcatgtcacggaaacgcttttccagcagtttcatttcctgccgctgcgtgtcgcttacgggagtcagttcgatgtccggtttcaggagggagtgtttgtagagtaccagccagtgattggtagtgccggcattgacaaaggggacttgcagatcagctgtctgctgacgggcgtctaccttcgtcgcagtgatcagatgatcgatgaaaaggcgtccttttgcattgggagccacgatgcagagctcgttcattccctcttccggcgtgccttgcatatcgcgttcatagcagacccatgccgcacgccagcctttgaaattgatgccgaaagggaaagaagcgcacttacggccgtctttcagaaattcaaactcgatagcagcgtcctgaggctgctcattgtatatccatacgatgaaagcggaaagatacaggtctttccctgtcgggtccttcttttcaaacttcaggtctttccggagttccagtctcccgttcggttcgaaggtccattccaacgaatgttttccgtctttataatgtgcaccggatatgcccaaccgagactgaacaccggttatacaggcaggcaactgcggctcttcaaaagagaacatccgctcgtccgtaactatctgcgcattgaggaatgccggacagagaaaagacaatatcagcattgtcactgacagagtaaaagattgctttatcatagaatatatcgttttaggtccgatggtaaatcggtttatcattagccggtatttacagagagagatcacttgttcttctcccgaatgcaaagaaacccctcttttgttggaaagaggggttcaaatcgtacaaaatagttcaaattatgtgctatatcttatagataatgaccgatatgctctctgccggtcctgctcttaagggtgaagttctttaaaagccgcattctcttcctgcacgtgctgaatggtttgtttcagctctgcaatcggcaaatcatatccataccagccggtataacagtctactacataccattttccatcaggcagcagttcgaactccacacgtaagtcgatctccgattcttcgtatcccgcctcaaataccttatgcgccggttcgttcagcgtaaacttagatacataaatgccgccctcttcctgagtgatacgttcttctttcagcgtttcactgtccagcaacggccacttttccttcgtaaaagggaacgttttctcagtttccccgtcatccgccaataaagtaaccggcgttttcaacggaaacttgacacgagtatactgaaacgccgcactggaagtaaacttatccagaaacgacttgaaatcttctcctgtctgtgctgcttcactttctactttcgccctggagctattgccacaggaaataaatgaaatacctgccagcaatgacatgaccatcaaacagcatgcaaacttcttagctctcataacacgatataaattaagagtttaaaataacactgcaaagataatgacaagttcaatatcttgatacgaatcgggaagaaaatagttaaactactataaataatatacttaccacacctcattattccggtattaaaatacctttgtcataaatcgaaatactaacttaaataaaaacacacctatgagacacccccactgttttctcctgataggtcttttgcttttatgcagcacacagactatcgctttcgcccaatccggcacttatcagacaattcccgaacctttgcgaggctactggcaatttaaagcagacaatgtatctgactggaacggtccgctcatcggagagaatttcgtagagaactattacgtcgttttctatgccgaacagataaaacaggaagctgacggcagctacttcttccatttacgcaatcagaaaggagatacgacggaattccgtatcacacctaccggtaatgacgctgccaccatctggtacaaaggctggaaagagccgaagaactgtatccgcaagcaagtccccgaccacacggaaccgctcactccccttacattgcccgaccgtatttatcagaaatgggtgaaaggattatccggaaaagtaatctacgaattcacccgtgacggaaaactgctctatgacggaaaaacatgggatatcttatcggccggatattttctcaataaagaatatcgcctgctcgtcaaaaacggagaagcgtacaaactgctttacctcagcttccccctgccgaaaacaatgaacgtagccgctgaactgcaaaatgaaaaagtctctcccatcgcctcacgccctgaaatatatgctttcgccggatgttggataaatcaagcgaccggggactggcgcatcggattcttcgaagactttgctgtctaccaatgtcaattttgggattatgagtcgataaacatccaaaagaatcgaaccaccatcatcctaaaaaatggaacggaacaactgaaagtacgtttaactcgtaaagatgaaacttcctgcaccctgtctgtcggaaaagaaaaggcacagacatatgttctttgtaacgacaagtatctgcccgattatccggtagctgacaccactcctttcgtagacaatggttatcaaacggatagcgtgactctcatcggatacctgcgtaacctgccttcgacacgtcctttcgaggttgctgtgccggacatgatcaccgatagagaagaaaaatataccaccgccatcgactcactgggaagatttaccctccgtttccctgtattgaacagccacaacgtgttcatcgattggggacgtaccactatctggacatccgtagagccgggagagacctatttcctctatgtggacttcgctgacaaaaagaaattagtaatgggagaaaaggcacgtatcctcaacgaactgctggcccacgaaggactcagtgaatatatcggctacgacgaaggagaaaaaatggaaaatatggaatatttgcaaaagacgcaggatatcatccgtcataaatcagaatatcgcgcaaagatgctcaatgatcatccgcttctctcgcacaaattccgctattacacagaacaggaaatccgctacaacgctgcacgcgacctgatgcagcgccgcttttcggtagaccgtaacaagcaggagcatctgcaaccgaaatttatgagttatgtagactcggcactatatccccgtccggtagagccttatacgcttctcagagattatggttctttcctgcgggattacgtcggatacataacggacattgctcccgcttcttcaaacagattgaccgtgactcctcaaaagatggaaatgctctatctcaaatttgaaagggacggaaagattcagctatcacaagaagaaaaagacgcattacacgccttcagtaacttcgaacaagaaattgaaaaaatgaaagctgcgaatacggctgactcgctgacaatggctgcctacaacaaaaagatggaaccgagcatcaaaacaatacagagcctcgtaggcagagacgaaattttcaatgactatatgatgggaaacttgctcgctaattccatcaatcgtacccttgctatcattgactccctgcaaatggacgaaaaattaaaggagatactaaaggcaaattgctattatgagatgttgcagcagactcacaaagaattgccggacagcctcatcaataaattcaaagcagaagtttctaatccttccctacaggcttatgtattaaaccaacaagggatatacgaagaaatatcccataaggccatcgaatatcccgaaagcctgatgcctaacgaacctctggcagagatcacagacggagaacaattattccgcaaaatcattgagccttataaagggaaagtggtttatctggatgtatggggcacctggtgcggtccgtgcaaggacatgatgcaatatgcaggaagcgccaagaaactgtttgagggaaaagacgtgatattcttatatctctgcaaccattcctcagacaaatcgtggaaaaacattatcaaggaatatggactgaccggcaaaattgccgtccactataacttgcccgatgagcagcaaagggctattgagaagttcctgcaggttcgctccttccccacctatatgttgatagacaaggaaggaaacatcgtaaaccgtgacgcccccagacccaacagggaaaatgatcttctcaatgcagtctataagttattagagaaataaacgactcatttcttccgcaaatactcgtatccgaaacggcaaaagagacatttccgtttatcacaatactctttgcggagctgtatcaatgcctggctatctgccgccgaaccgaccggtagcccggcatctccccacgaccggataatatgattattctccgctttcaactcttccagaaaacgtccggcacgatcacacatccgctcatcggttctatgcagaccataagcatataagaaaggaacaacggtattaatcacaatcaagtcctgtgacctctctcccatcgatttctctttctgcgaagaaggccggccgaatatataatgattatcccaataagcagaagcatgagtagacagtagttgacgcacttccggcaaggtttctgcctccatcatctgcgaaaaaagcttatcaactttctgatacaagtaggccaactgtgctaaccggatatgggggaagttttccggacgaagcctcaaaaaacgccataaaccggcatccatcacctgagttatttcaaacttccgttgcagatagcgaaattctttacgaagccggagactatactcatcttcctgctccttctttaaaaacgcctcctccagcaaaccggcctgcccgaagaaaaaagcctctatctgaaacagatcattccgatgcttgtctatcgcccggaacggaagcagtcctgcccacgtctcaaaagcatcgccattcaagccgaaaccgaaattacgggcaagagtgataaagaaggcatcttcccaatgacggtcacatcgttccagccgttcggcaatttgccttgccttttgctccagtcgttcggtctgaagagctgtcagccaggagtgaatcgttaatttggataaagagctgatgatggaatagcaggcaggatattggtcggcaatgcagagttcatgataatgggtttgtacattctcgggacaggtcaatagcagttgggggatttgctcaccgttggaacgggttacttcggcgtctgcctcggccaccacatgcagaatcacagaatcgtatgctttatcatggtcgtgaccgtgacggtaccagtctgaagaatgagtatgtatctctatatttcccacccacaatgtaccgtctatcttcagcttcgcattaaaaaagtcgggaccggcatcagggttctgcagtccggaatcgataatttctaccagtaagcctttggtggtttgcagtattttgagagggaataatttatgtttccacacatagtggagaaggtgttccatgttaacagaaagttaatgtgcactgcaaatgtaataaaaatcttatctttgcgactattattttgaatataagtcagaaaacaatgaaaatagcgttgatcggttatggaaaaatgggcaaggaacttgaaaaggcagcccttagtcgcggacacgaaattgtctgcattattgatgttgataatcaggaagactttgagtcggaagcattcaagtccgctgacgtagccattgagttcaccaatccgatggtagcctacagcaattatatgaaagctttcaaagccggagtcaaattagtatcaggcagtacaggatggatggcggaacatggcgaagaaatcaaaaagctatgtaccgaaggaggaaaaacccttttctggtcgtccaacttcagtcttggagtagccatcttctcatctgtcaacaagtatctggcaaaaataatgaatcaattccccggttatgacgtcaccatgagcgagactcatcatatccataaactggatgcacccagcggcactgccatcacactggctgaaggcatactggaaaacatggaccgcaaagacaaatgggtaaaaggaacgctccttgcaccggacggtaccgtcagcggcaccgacgcctgcgcttccaacgagtttcctatcgactcgatccgtgaaggagaggttttcggcattcataccatccgctacgagtcagaagtagacagcatttccatcacgcacgatgccaagaatcgcggcggctttgtattgggagccatccttgctgccgaatacacggcccaacatgagggatatctgggcatgagtgatttattcccattcttaaacgaataaggcttcaaagccactatcaaacgaatatagattatgagacaagccacacgcacacaatggatcaaatgcaccattgctattctcctttatctcgccttcctcatctgggtacgcagttggtgggggctgattgtcgttcctttcatcttcgatatttatatcaccaagaaaataccctggtcattctggaagaaatcgaagaatcctaccgttcgtaatgttatgagctgggtagatgccattgtctttgcattggttgctgtctactttgtcaatatctacattttccaaaactatcagattccttcctcgtctttggaaaagtcattgctggtaggcgacttcctgtacgtcagcaagatgagctacgggccacgcgtgccgaatacgccgctttccatgccgttggcgcaacatacgttgcctattttaaataccaaatcatatatcgaatggcctcagtggaaatataaaagagttcccgggttcggaaaagtgaaactcaatgacattgttgtcttcaactttcctgccggtgatacggtagcgctcaacaatcagcaaacagatttctactctatagcttacggtgaaggtcagcgcctgtatcccaagcagatagagatggacagtctgacacgccagcagcaacgtgctgtttacgatttgtattataatgccggtcgccagcagattctatcgaatccgcgtgtttacggagaggtcgtttatcgtccggtagaccgccgtgaaaactatgtaaaacgctgtgtcggtctgcccggagatacgctgcagatcgtagacggtcaggtcatgattgacggcaaggctatcgagaatcccgaaaatctgcagttcaactacttcgtacagaccacaggcccgtatatcacggaagatatgttccgtgaattaggcatcagcaaggcagaccagacattgtatgatgattcttcatgggaagaaaccttcagacagatcggactggacaatcggaatgcacaaggaaagatggctcctatttatcatcttccgctgacgaagaaaatgtacgaaacattatccggcaacaaaaagctcatcagcaagatcgtcatggaaccggaagagtatgccggacagatgtacccgctcaacttacataccaaatggaaccgtaacaactacggtccgatctggattcccgccaaaggtgctactatcactctgactgaagataacctgcctatctacgaacgttgtattgtcgcttacgaaggaaataaactggagatcaagccggacggtatttatatcaacggcgagaaaaccgatcaatatacctttaagatggactattactggatgatgggcgacaaccgccacaattctgcggactcccgctattggggattcgttcctgaagaccatgtagtaggtaaacctatcgttgtatggctgtcacttgacaaagaccgcggatggtttgacggaaaaatccgttggaaccgcctcttcaagtgggtagactgataaggatacagacgtgatagagtgataaggtgatagaaattgatgaacattcgtaaattaaaatggatattcgcattcgccggagcaatagccgtcgtgcttctgctccggggattcgcttttacatcctgccttatcccttccaccggtatggagaattcactttttcagggtgaacgtattctggtcaacaaatggagctacggcctgcggcttccgctgatgtcgctgttctcatatcaccgctggtgcgagcgatctgtccggaagcaagatgttgtagtctttaataatcccgccgccatcgggcaaccgactattgaccgaagagaaatctatatcagccgttgtatcggtactcccggtgataccctgcttgtcgattcccttttctccgtatcctctcccgaagcgcaactcaatccggacaagaaaaggctctacacctatcccgctgccaaagagcagttgatcacttcgcttatgcaaaccctttccatcaccaacgacggactaatggggagtaatgacagtactcatgtccgcagtttcagccgctatgaatattacttactggaacaagcgatcagcgatcagaactggattcagcctttgacggaaaagagcgaaaaagagcttaaaccgctcatcgttcccggcaaagggaaagcactacgagtatatccgtggaatatcacattgctgcgaaataccctcgtgatgcacgaaggcaaacaggcggaaataaagaatgatacgctttatatcgacggaaaacccacacagcattgtttttttaccaaagattactactggatggcttccaacaatagtgtcaatctgtccgattcacgtctgttcggattcgttccgcaagaccatattatcgggaaagcatcactaatctggttctctaaagaaaaaggaacgggaatctttgacggataccgatggaatcgcttctttcagtctgtaaaataattcacatgcatagttttcaacataacatctgtacataaaataatgagaatagcttatttatcatctgcctaccttgctccggtagaatattataccaaactattggaatatgataaaatatatgtcgaacaacacgatcattatataaagcaaacctatcgcaaccgttgtacgattgccggacctgacggcgaactggcactctccattccaaccgtcaaaccggatacgctgaaatgtccaatgaaggatatacgtatttccgatcacggtaactggcgccatctgcattggaatgccatcgaatcagcctacaacagtactccttactttgaatattacaaagacgacttccgccctttctacgaaaagaaatacgagtttttagccgatttcaacgaggaactctgccagctggtctgtaagttgatagacattcagccttgcatcgaacgaactacagaatataaaatggaatttgctacagaagaagcggacttccgcgaaattattcatcccaagaaagatttccggatagccgacccggaatttattccgcatccctattaccaagtctttgattccaaactcggttttctccctaatctgagtattattgacctgcttttcaatatgggaccggagagtttgttggtattaacaagtaaataacattataatagccagacaaagacatcaaacgtcctgacactacttatcttatcatacatcccggttaagttaacaagcggacaagccttgattaatatcttttgtctgcttcctgttttcgttccacgtacgtaaaccgttgggactacgtacgtgatcccatcggttcacgtacatgaactcatgggattacaggcgtgaaacgaagaaatgtaacgaccgtaatacattaatctaacgtagaaaacagcttaacaaacgtagcacagaccattaaatgaaccgtcttacctgaatcaggaaggcagaatctcttatgaaggtgacaatagaaaagcgatttttctctattatcaccctattatcaccacctattatcacccttatcacgctaaattgcagcacattaagtctgaaaagtgacaagtgacaataagaataacgtttttaactctgtagaaagagacaaattataatcatcaggtcactattatttccttcaacagattactcttcattcagtcgattcagcaaatatctgacattctcaagatgtaaatgattgacccggtacatctgtttatattgccaactatttttagtagtatcgataatacaatctataaaagagcccattatattggcactttgcatacgattggtatttgaaacctgcatattcatcatatgcataccaaatcctttaatcacatcttttacactaattttcttaaaatgatgaactgcctcgaaggctgctacattaccaaaaagaacattctctaaatcttccagtctttgccgatccgagcgttccaccaaataactggctggatttataaaacgattgagcgtaagataaaaggtcatcatttcatgatctgaagaaaaaatggcatgcatgaattgtgttgcgtcccccggacaaacaatctgctggttgtttaaaacctccttcataagaatttaaattaaatggtgaataaattaagttcaacggggctaaacagaaaggtggttttagataataaaagaagcggttccgcctgtcccattgctcttttctcgttcacacaaggcagcaggtgcattaacactctacatgggggtgcgaaaccgcccatatagaatgaaccggacaggcataaaaatgcctgccacaattacaaggcaggtttccagccttgtgtgattttgaaaaaagagcactacaaagataggacataaatcagaataggaaaaagaaattcattctaaattgcatataccacagtaaaatgcaaggtataagccttatttctaatcacaagccaaactcgtttcaaagaaaaaggagaatgttgtgactctctcttttataagataacaacattctcccagcaatctgttttaccgggggaggaccccagttttaccaaccggatacctatctcaactcaaatggtacaattcctttaatgtctctggatgatgttccgatgactgcttcaaacttacccggttctgtcatccattcgtgtttgacatcatcgaagaagctcagggcttttttatcaattatcagcgttacagccttctcctcacccggagccagttttactttcttgaagcctttcagttccttgaccggacgaggcagagaagatttcttatcgctgatataaagctggataacttcctgaccttcacgagtacctgtattctttacgttgatcgtgaaagagatggtatcatcggcagtcatcaccttcttgtcagccgaaggtttcccgtaagcgaaagtagtatagctcaatccgtgtccgaacgggaaaagcggtttggtcttttctttgtctgcccagcgatagcctacaaaaatatcttcacgatagatttcgtttatggtatcaccattgttcttggagtgtgccaactcttctttattccccggatattcacccagtttatgtgcgcctacgtcttccagtcttgcaggaaaagtaaaaggaagtttccccgacggattagcatctcctagcagtaccgaagcaagagccgttccggtttccgaacctaagaaccagccttgaacaatagcgggcacttcatttacccaaggcatggcaaccgcattaccggagatatttacgacaatcaagttcttatttacttttgccaactcgccaatcactctgtcctgcgcatacggcaatccaagggatgcacggtccgaatcttcgcaatcctgatgattgctcttgttcagtccaccgaagaaaattacgtaatccgcatctttagacacttctacagcctcagcaagaagttcatcctccgaacggtcgtctttcaaatcttgtccggtctgtactccattatattcccctgtcgggtcaccaacgtatccacgggcatacaaaacttccgtctgtgaacctacgcggttcttcaagccgtccaaaggagatatctcatatttcactttcagagaagaactgccaccgcctacagtcatcatcttaatggcgttttcaccgataacagcaatcttcctggctttcttcaagtcaataggcaatacattatccttattctgtaacagtacaattccttcttcaccgatttttcgtccggcttgtccatgctcgggcgaagccagagaaccgaaaggtttatgcgggttcatcgaagtgcggaagatcagacggaggatattactcaccttttcgtccagttctttggttccgactgttccgtcctggatcagtttcaggtaaggatgtgccaaatagtaattgtcataagcattccttgtcccggcagaaagtccgtttgtccatgaaccgaactccatgtccagaccattcgaaatggcctggaaagtatcatgtactccgccccaatctgaaacgacgacaccatcaaagccccattccttacgcagaatatcttgcagtaatcgcttattatggcacgcatgctgagtcttatagagcttaccggagtcggtatcttcactaaacgaataaaggttgtaagctcccattatcgcccaagcaccaccttcctgaacggccgctttgaaagccggaagataaatctcataaagagcacggtcgctcaaatgaacattggtggtgtgacggttgaactcctgattgtttaatgcgtaatgcttcacacaagcagcaacaccgttttcctgtactcccttaatataaggaactaccatcatggaagacaggtacggatcttcgcccatatattcaaaattacgcccattcaacggggtacggtagatgttgacaccgggccccaggagaatatcttttttccggtaacgggcttcttcgccaatgctcttcccataaaggtaagacatttcgggattccatgttgcagaaaggcaagtcaatgcaggataggctatacaggaatcgtttgtccatcctgcctgatcccactcatcccataatacttcgggacggatgccgtgagggccatcggttgcccatacttcgggaatccctaagcgggggactcccggtgaactaaatttagactgcgcatgagtcatcttcaccttctcttcaagtgtcatacggctcagcgcatctttcacccgttcttcgataggcttgctcgtgtccagatatactggtgtctgcgccatattcatagtcggtaaaacggcggctatagacaagccaagtaacgttgctttaaatttcatgttcataaatgatttctgtatttttacttcttcacaacagaaagaattcctttatctatcccctgagtgaaatctaacgtaaacacataagtaactccctgttctaacggagaggccaatacaagattttcctcatcaacattgaataagttccgggtagcctgatccatttgcaggttcttttgatgaaattgctgatcccaagactttccacccagatatttaacactgatataatcgtatcgtatgcgttcaccaataaccgtactgccttcagcaccagtcttcccagtaaactgataaactttcggactgatttccgccacacaataagcagtcgaaaagtcccagttaaattcgtccttaatagacggagagcccataccatagcccaacaaccatacggcaccatgcccgtcagcatccagtccggcttcactattgccattcatacgtactactgcaaagtatttacgtgtagcatttaccatcaccctgtagctaccggcaaccggcaagaacttcaagtgattatctccggtcttcaccagataatccggatcaacataccaatcatttagatcttcgatgccacctatttcgagtgtctggttctgcgtcaaagacatctgcaattgatacatatcggaactgccttcttccagcttcattccattgattgtaatgtccggtcgcggcaagtctacctgtcctactttctctacagtcagtactgctttggtattacctttcgttacatctaccgtaaacttataaacaccacctctctcaaatttctgaccttcctgcaacttcaagttacccgactctgttatttcaacaaggtcgcttgtagtagagatggcatctcccttaaattcaccattatcccacttgtttatgtggaagaatttaaagtcaatatcacttgttttcatagtcacaccggcagtaaacgtaagctgatacttctttgccgtaagttgcggcatacacaaaccattctccggcgtccatcccacttcgtacaaagataccgacggcttgccaattccatttccgatagcccagatagctcctgttccgtcatcctgcaatttagctgcttcaccgtcttttaaagctatgacagagaagtactgtctcttaccgtttgctgtaatctgatagcttccgtcaatcggcaggaacttcagtgttccatcctcctgcttttcaaagaagtccggatcaatccaccattcatcataagcaggcactccttcgaacgtcagaatgtcattctgctttaacgacaatttaacagcatatacatcgttttctaccagttccatttcttttccgttcaacaataatttggcaaacggactcgcttcatagttgaaagtattaaactgaatcgtataattgcccggctctgtattggagaacgggatagacgtagtagagcctactgcaatcgtattgtcttcccagccaaaagttagctcgttgccgtgctcccctactttcggagttttgatatacactttcatcttctgcgaaaagtctcccgatacgctataatgatacatcgattgcctgtccatccggtactcctgcccttcttcatctaccagggtcagataaggaaagtccgggcgtgccaacgtaagttccgtttcctgttccgtcgtagtaaagtgaatattctgaaggatatacttcaatgtcgcctttccgttaggaatattagcataataaggaatataaatctttccagtatagtcgcttccacttgtctttgttcggatcaccgtttcagatacctgttcttctccatagaaaagctgcgctttcaaagtagaaagaggaacgtctacatccgaagccttgatcgtaaacggaaggctgtcgccgaaaagggcatccgcattctccgccttgatctccatactcggattaccgggaaggaactcgtcatcattacaggaattcatggataagattcccgccaatgccaatgttatatagatactttttttcattgtctttatacttttaaggttcttactttgactttgcccaacggtatgaagttactgatttaccgggaacgtcataagcgaaatgacgttggccgtcgctgacagttatcttcttcgacttctcattgttgtttatcagaacaaaggcatacgttccgtccgtattttcgaaagcagaacaggtaataccgttgtccgtataaccggtagtggcgatacgcacagctcccggcttcacaacacttgaaagatgagcaatgatatagtagtgagagttacgtatgattgtcttataatcactgttattgatatctaccgcaccatagcaagtctgacaaccaccttcacgattcggaccacggtcgttatcgagcatcagattccagacaattacgcccttacaccaattattgattgttcccaatgctacctcttccatatcttccatcagacgcttcgacaagtcacgtccgctgttccatgtgccgatagaagtttctgtaaacagaagttctttctcaggatatgcctgatgtatattcagcaattcttcacggttgccgccatagttatggtaagcagcacctgccagatactgagaagcagcagcatcttcgtaaatcttgcccggatagttcttctgcgattcgatattgtcataattgtagttatggtcgaaagcataaatcttggtagacagtccggcagctttcatctgaggaccgagcgctgttttcacgaagtctttttgttcttcccattccatatagagcgaagcggagttgccacggttcaaaggttcattttgcggagttactgcataaatgtcaatgccttcggctttaaatgcctgtatccatttcacaaaataagtagcataatcctgataataatccgggttcaattgtccgttcgtccacgaatctaatggtgtacggtctgtcaggcttttcactttcatccatttcggacaggtccaaggagcggcaattaccttgatagaagggttaatggccagaatctctttcaggatcggaaggatatagtccttttcttcgctctgcaaagcaaagttttcgatccctttcgtatcacagcaggtatattcgcttaacgagaagtccgaacaaccaatggaaatacggatgtaactgaatccgaaaccatctttatcggagaatgtttccgtcaggaaagcatgacggtcagccggtttcatcagtaacaggttgtaacaggtagaacctgtgatagctgctccgaaaccatccatcgtctggtactgttccgcaggattcaaagttattgtggttggagccaaattgtctttcgggctgaagttaaccgcatcacgggtcaaatcacgggtcagactgctggttgtcgtataaatggctacatctccggtggggacaggtactaccggtttttccgcatcatcactattgctacaagccgctaatatggtgaagcatcctaaaaaggtcagtgctatatttctcatgtttatcataatcgttagtttctttttctatttaaatacattataagtgatgttatctccggctctatcaatatccggggttctgttcaatcttgtcattggcatcgattaccgattgtgggataggcaggcgataagagttcttatcaaaggcgtaaacctgtgacttgcgacctgaatctttcgcatatacggcgttcatcacctcttctaccttatccagacgaaccagatcaaaccagcgttgtccttcgaatgccagttccagccgacgttcgttgagcaatgcggtaatcatcgcatcccggtctttacgtacggatgaagacaattcgcccaatccggcacgttcacgcacttcgtcgatgatcttagctgccgcttccagatccggcgtatcctgcatgatcaatgcttctgccttcaataacagcacatcagcatagcggtatttaataatgctgctattagccgaacggcatttgtacatgaaaggataattgtccgacggataatagttactccaattacaatcatagtaaactacggattcctgaaagcgaatctgatctccttctttcttgaaagcattgatcaaatcacgtgacggagttacccattttgcccaagtgaagttattattccagtttacaaggtcacgtccgaacatccatgtacaccagttacccgaaccgggagtaaactgagcttccagtatagattctttagtattacggacttttgcatccgttccggcagcattcatgccgaacaaatcgctaaaatccttcacaagctcaaaaccatcagccttcacctcgtcacagtaacggattacttttgaatagtcacgcaacggtttctctgcatagatctttgcaagaagagtacgggctacggattttgtaaacagagttttgttgcctgccgtattatccggcgcatgctggatggcagccagcaaatctttctctatctgctgataagcttccagttctgtgttttgtgccgggaaatattgttcatacacatcttcgatattttctgaagtaatatcatcagctaccgttgtaataaccgggaaatccccccacagacgtaccatatcgaacatgaccatggcacggaatatcattgcttccgccttatactgcgcacgttcggcagtagtcaaagagttatcggtcaccaagtcaatattacatatcaatttattggcacgggcaacgtcttccagataacggttccagtcacgttcgagcacagagttggaaccttcgatggaattgttctcaaacggaagtacctcagctcccgtagttcctgcgtacgcattatccgcatgcgaatctgatatgagcaacaagtccacataccagtgttcctgacggtcgcgcatttgattgtagatagtcgtcaggtgactttctacagccgctttatctttaaataccacctttgtaccggtatccgtcacaccttcggtcacatccgaataagtatcgatcggatcgtaattcagtgagcaggaagaaagtccgaacagcaaaccggaagtgagtccataaaatatatatcttagtttcatagtctttcctttcattagaattcaacattaataccaaacacgtatgatctagaatgcgggtatgtaccccagtcgatgccttgcaccgtaccgctgttgccccattggtttacttccgggtccatgccggagtagcttgtccatgtcagcagattggtagcggtaaagtaaggttgcagacgggtgattccccatttctgcagtaatttgcccttaaagttgtacgacaaggaaacgtctttcaatctcaggtaactgccatcttcaataaagtaagtagagttcagcaacttgaaattagctttcggcacattggttatctgtccaggtatcttccagcggttcagtactttggtagactgattctttccatcgtacatcccttctgtttctatacgggaagcattgaagatatcatttccgtaagagccttggataaacacactcaaattaaatcctttccatgagaaagtgttggtcagaccataagtaaagtccggattcgggtcgccgatataagtacggtcggaagtcgagattttaccatcaccactcaggtcacgatacattaattcaccagtctcaggatctacaccgtcactgatatatccgtaaaagcctcctaaagcacgtcccggctcattacgcactacataatcgttgactacatccgcagttttggcatcatagtacactttctgcaattcaagtttcgtcaatttgttccggttgaaggaaatattgaagtccgtatcccaggtaaatgctcccccccggaagttcttcgaactaatggtaagctcaaaacctttattagtcatttcaccttcattacgggcgatagaagtagctgcagcagcaccggcaggcagtgatacgttcatcagcatgttcttggtcttcttgtaatagtagtccatgttaaaagtcaaacgtccattcaatactgtcaggtccagaccaatattggtctgagtagtcgtttcccaagtaaggtcagacgtccgtaaattggcctggctgatagtcggtaccgcattcgcataatctgttgtatcaccttcagccgctaccttaaaccattcaatacgaccgatattataacgttgcaaataagcatagtcaccaataccagactgattacctgtctgtccccagcctccacgtattttaaaatcatcaatccacgtcagatcagccataaacttctcggaagatacacgccaggcagctgagaacgatggaaataccccccaacgatgatcaggatgcaacttagaagaaccgtcggcacgcaggttagccgtcaacaggtacttactatcaaaattgtaagctacacgtccgaaaaatgacataattccccattgagaagcacctgtaccggtattatcccaggcaatcttgttcgcggcattcaaggtctgtatcagatcattgcggtagtgtgaaccgtttatccagctgttagagtagtctgaatccgtccacgatgatcctgccattacctccagaccatgtctcttgaagttcttattgtaagtaaatacattgtcgaatgtcaataccgtattcatattccggttgtcggaggcttcgccatactggttacgtccccaggcagtagaaatcggatcaagaaaagtagtatttacagcattgcgacggtcaagtgttagagttgatttaaacttcaactccggcagcaaggtaagcaacacgttgcccgatgccagcaaacgattttccttatctttattattcttcgcacgtgccatgttctccaacgggttggtgatatttccaactccatagaagttattgtaatactggttcggatttaaagcatcccagatcggagcatatgtcggcgtattgataacagccaatacaacgccaccgcgattcgctcctgttcccatcgctccccctccgttactggtatagtccgagtaggagatattagcacttactgtcaaccaactacgaatctgattttcaagattcacccggaaattataacgcttataataagagatatccagtattcccttttcatcgagatatccggcagaaagatagtatttcatcttttcattaccgttagatactgctacctgataattttgcatctttccggtcttatatgtttcgtcaaaccaatcagtacggtcgggcagtccatcaggcaaggataccagtccgatttcatcctgtaactctttatactgcgcagcattcagagattctaccttatccgccaccttgttcaagccaaactgtgctgtcagagatacttttgcctttccggtcgctccggcctttgttgtaatcagaattacaccattggcagcacgcgaaccatagatagaagccgaagaggcatctttcagaatctgcatgctttcaatatcattcggagataaaaacttaatgttatccacaggaacaccatccactacatatagcggatcgttacttccgttcatagaagtagtaccacgcacacggatagacatctctcctcccggcgtaccgctaggctgaattacggagataccggctgccttaccctgaatagcctgtccggcagaaacgatgggacgtacatcaagatctttagtagacacagtggaaatggctgtcgtaacatctttacgttttaccgaaccatagccgatcacaactacttcttcaagtacttcattgtcttcctgaagtgtaactttcatctgtcgggatgctttctgttcctgcgatttatatcctacataagagaatattaaagtagcattggaccggaccgtcaatgtaaagttaccgtctaaatcagttatcgctccgttagttgtccccttttcctgtacacttacaccgataagcggttctttctgtgcatccagcacctgaccggatgcagtaaattgttgtgcggatgcactcagagaaaaaaatactgctaagatagcaaagagaatcttgcgactccccgaaaggatttttcgcctgttctttttcatgcgtattaattttaaagtttataattaaggtatgtgcttgacaggactttcgccactatttcagaagcacaggtcaaaagtataaagaaactgaagtgatttgacaatgagggtataataagtggattatacaaacatacaaaccactaataaacagcaagttaatatcaaccaaagaggcctaaaaagtggataggttacaacatcgatcaacgtattttccgaactaaatcttcgaaatcttctctggaaccacgagctttgttttttactttcgcccgataattataaattgtattcaccgaataacggagaaactctgctatttgtgaactatcttcaataccaagacgtattaatgcaaaaattctcagttcggtattcaataattcatctttcttcagaatgatttgttcattgtcttgcaacaatgcattgaacttcttcacaaaatcgggaaataaatgcaggaaagcagtatcaaagttggcatatagttcttccaattcctcatcaagggcatcctgtgagcgggtgattttaagtaattctgctatctgaccagcagatactttcttatttaccatacgacgatatgcatcgagccgattgatataagtagagcagagtttaataaaacgggcaatatattcttccttaatctggttagattcagacagttctgcattggtagatgtcaaacaggcattcatttgctgtaattcttcattcaattgattcaattgatgattggctgtctgcagatgattccttgcaacagccaatttcttcatctgccggtatatatagcccaacgcaccaatcagcagcaccagcaatgccgtaatcagcactaaatactgctgaaggcggtcgttctgtttctcaatcatcgcctgataagttttatcaatcaaagaaagcacatcggcactctgccaacttcgaagacgagcattatagaatttggtagcattccacgagaaacgcatatattggtaagctctctccatatcgccattctcatagagcaactgagccaacatccacaaagaagcatgatctttaatagcagaacgaatatcagagatagcagaaaggcaaagattctgtttctctcttattttatctccaagatatttataaataagtgagcgatggtaagttacaagtgcatattgaggcgtatcgggctctgctgccatcagacgacggtcgtttatctccaaggcctcatcatacttgtgccggtcacgaaacaacgtttcgcgcatgaccataaattcttccgattgaggagataatatcgcatataatgaatctttatatgctgacgatatttcccgataataagcagataacgtctgatcttgtgtataaaatcccatctcaccatacacatgatcgaaacatgtataataatcaagtatcagatgtgaagttaccttctgtcggtctactgacttcaggacatcaattgattcggtatacatacccgtagaagaaagcaaaagagaaagttgcagcttactttctatttcccggtcagtatctcccagattacccgcgatacgaacattctcatttaaatagtaaatagcggaatcgcaaataaaggctttatattccttatagatctgattattcagattatagcgttctatggaattaggagccacgtctccggcaagctctttcagatgccgtatccgcgattcgcgctgtaccacataagtgtcatgtgccaagattgtctgatcaaggacatgcaatagtgaatcaagagtttcatcagcccatgagaaaatcggaaaagaagcaaacagcaacaacagcaaacatttatttttcattagagtattaaagttttgtaggaaatatgacattcttcactcaaggtatcacttataaatcagcgtcgacaaatattcctccgcaaacatctcattggcaacctccagcagttgttctgccgtcaacgcctcaatacgatggaacactgattctgacgattcatacttatgatagtgcagatatgttttcgccatacctagcgcattattctcgaaattatcagatgccacgccgatctggcctatcagttgcttcttcgctgccgccagctgagaagatgtcatcttcacatcccgcattcgcttcagttctttataggtcagtttcagacagatatccatatcttcgatatctgtaccgaaatagatacagaaagctcctgtatcggtataagaagtcagattggactctacattatacaccaatcccctccgctcgcgaagcgatacattcagcttactgttcatgcccggaccgccaagcacattattcagcagataaagtgccgtacgcttatcatcatacgcattgtatccccggctaccaatcattacatgcgcctgatgagtatctttaggcactaccaaccgttcgggcacataaagaggtggaggcatccgctgattatccaccgtcactgccgggatatcggacaaatgcttttccgccagacggataatcttcttgaaatcatattgtccctgaacaaagaataccatattccccggttgataaaagcgacgggtaaacgagagaacatcctccgtacggaaactccgcagcagttccggcttaccgagaatgttccttcccaacggatggttacggaaaatcatatcttcaaaatcatcgaagatcaactccgaaggattatcctcataagactggatttcgtcaatgatcacttccgtctccttttctatttcatgctgcgggaaagtagaatggaatacaatatctccgagcaattcgagggcacgttccagatgcccggtcaggaaggcggcatagacaaccgtctcctctttattcgtataggcattcagatcgccgcccacattctccatgcggttaaggatatgccacgctttccgcttctccgtccctttaaaaataagatgttccacgaaatgagccatcccctgctcatcctcagcctcatcgcgcgttccggcatcgatggcaaaaccacaataagctactttcgagagagtcggttcatgaattatgcgcaggccattcggcaatgtatattcgttgtaatgcattgttttctacttccttattgaattaatgccgcaaaaatacaataaaacttattgtcgtttatagaaaattgcagatatttgtagactatattagcaacaacgtgtatgaaaaagataggaatattctgttctgcctcggaaaacattgacaaaatgtactttgacagtgcccgtcaaatcggagaatggatgggaaaagcaggcaaaacgttgatttatggaggagccaatctcggactgatggaatgcgtagcccgcgccgtgaaagagaatggcggtacggtcatcggagtagttcctgccaaactggaagaaaaaggtagtgtgagcacattactggacgaggtgattcatacccgtaacctgagcgaccggaaagatgtgataacagagaagtcggagatattggtcgcattgcctggtggtgtaggtacactcgacgagattttccacgtcatagccgccgcctctatcggatatcatcagaaaaaggtgatcttctataacgaatacggtttttataatgaacttctggctgcacttaagacgttagaggataagggcttcgcccgacaatctttctctacctattatgaaacagcaaacaatctggatgaattaaaagaaaaaataaactgattatatgatagactccatcaaacaactcttgcaacaagaggcacaagcagtgctcaatatccctgtaacagacgcttacgagaaagcagtacaactgattgtagaacagatacatcagaaaaaagggaaattagtaacttccggcatgggaaaagccggacagattgccatgaacatcgccacaaccttctgctccaccggcattccatcggtcttcctgcaccccagcgaagcccagcacggcgacctcggcatcttacaaaaaaacgatttgctcctgcttatctccaactccggcaaaacacgcgaaatcgtggaactgacccgactggcacataatctggacccggaactgaagtttatcgttatcaccggaaatcccgacagcccgctggccaacgaatcaaacgtctgtctgagcaccggtaaacctgccgaagtttgtacgttaggcatgactcctactacatcgactaccgccatgaccgtcatcggtgacatactggtagtacagacaatgaagaagacaggattcaccatcgaagaatactcaaaacgccaccacggtggttatttgggcgaaaaatcaagatcgctatgcgaaaagtaatcggtatcggagaaacaatcctcgatatcatctttcggggaaaccagccttccgcagccgtaccgggaggctctgtattcaacggcatcgtatccctcggacgaatggggatcaaggtaggttttatcagtgaaacaggtaatgaccgggtaggaaatatcattctgcaattcatgcgtgaaaataatattccgacggatcacgtaaatgtcttcccggatggtaaatcacctgtatcactggcattcctcaatgaacagagcgatgccgaatatatcttctataaggattatcccaaacaacgtctggatgtgctttatcctaagttagaggaagacgatatcgtcatggtaggctcttactatgcgctcaacccggtactcagggagaagattctggaactgctggaccaggcacgcgagaagaaagcaatcatctattacgacccgaacttccgctcttcacataagaacgaagcaatgaaactagctcctacgattatcgagaatctggagtacgccgatattgtacggggatcgctggaagatttcttctatatgtatggcttgcaagatgtggacaagatatataaagacaagattaaattctactgcccgcggtttatatgcacggccggtggggacaaagtatcacttcgtaccaatctggtcagcaaagaatatccgatagaaccgctggaagcagtcagcaccatcggtgccggagataatttcaatgcgggattgatctacggattgcttaaatatgatgtacgataccgcgaccttaataatctgaatgaagaagtctgggacaaagtagttcagtgcgggaaagactttgccgccgaagtatgccgcagtttcagtaattcggtatcggtggagttcgccggacagtacgcatcgaagtaattacggatacaaccatcccctaaattactattaactttggctaataatcgcaaaggaattaccacatctagcggtaattcctatctttgcagtacatgattcatcagacaaagaaactatgtacagaaacctgttaaactggctgaccatcctactggtacttccgtcatgttccggcacttcgcccactatatccgtagtgtgtgaagagaacaatgtgggaaacgccattatcaaatgggaaacagcccctatactgaaaggacaggtaaaagtatatgcttccacttctcccgacttcattcccgaagaaaatcccgtagccaccatcaacattgaaaaagggaaaaagaccatcgtgaccaatgatccgtctcagcgctattactacctgatggtattcaacaacagataccgagtgagggtagctgcccgtaacgtcaatattcccggcattcagaacttccgtgacctgggaggatacaagtctgcagaaacaggcaaagatacccgctggggaatgctgtaccgttctgcacagattgacagcattccattctgctcccgccgggaattgaaaaacatgggtataaggactatcatcgatttgcgttcggaagaagaacgccataactatccacagtttcatgatgaagactttaacgtcctgcacctccccattgcaacaggaaacatggaacacatcctgcaagacatacgtgataagaaaatagaaacggatacgatctatcgtttagtagagcgaatgaaccgtcaactggtcaccaactaccgcaaggaatacaaagaactgttcacactcctgctcgaccgcaacaattatcccgtcgtcatccactgtacttcaggcaaaggacgtacgggcattgtttcagcactggtacttgccgctttgggagtcaatgaagaagccatcatgaaagactatcgcctgagtaatgactatttcaacatccccaaagcctccagatacgcgtataaactccctatcaactcgcaggaagccatcactacaatctactctgccaaggaagacttcctgaatgcagccaaagaacagattgatgcggaatacggcagcgtacaggcatatctgaaaaaaggaataggactctcggcagaagaaatcgaacggttgcgcagcattttattaatagataatggttaatggaaaatggagaatgctatgcagacagcaataattatccattatccattattcattattcattatttttctctatctttgcgcccgaaataaaagatatacagagatttaatgaagacatttgaagagcttggcgtttctccggagatacgtaaagcaattgaagagatgggatatgagaatcccatgccggtacaagaggaagtgattccgtaccttttaggagaaaataacgatgtagtagctcttgcacaaactggaacaggtaaaacagccgcattcggcctgcctctgctccaacagattgacgtaaagaacagggttccccagtcactaatactttgccccacccgtgagctatgcctccagatagcgggcgatctgaacgattactcaaaatacattgacggactgaaagtactgccagtttacggcggttcttccatcgacagccagatacgcagcctgaaacgcggcgtacatatcatcgtggccacaccgggacgactgctcgacctgatggagcgcaaaaccgtatctttatcgaccgttcacaacatagtgatggacgaagcggacgaaatgctgaatatgggattcaccgacagcatcaacgctatccttgccgatgtccccaaagaacggaacaccttgctcttctcggcaaccatgagccccgaaatcgcccgcatctccaagaactacttgcagaatgccaaggagattaccatcggacgcaagaacgaaagtacaagcaacgtgaaacacgtagcttataccgtacaagccaaagacaaatatgcagccctgaaacgcattgttgactattacccgcaaatatatggtatcattttctgccgtacccgtaaagaaacgcaggaaatagccgataaattgatgcaggaaggctataacgcagattcactgcacggagaactgtcacaggctcagcgcgatgccgtgatgcagaaattccgcatccgcaacctgcaattactggttgctacggacgttgccgcacgcggactggacgtagacgacctgacacacgtgatcaactacggcctgcccgatgatacggaaagctacacacatcgtagcggacgtaccggacgtgccggaaagacaggtacttccatcgctatcatcaacctgcgcgaaaaaggaaagctgcgtgagatagagcgcatcatcggcaagaagtttattgccggagaaatgccgacaggcaagcagatctgcgaaaaacagcttatcaaagtgattgatgaactggaaaaggtgaaggtaaacgaagaagaaatcacggacttcatgccggagatttatcgtaagctggaatggctgagcaaagaggatctgatcaaacgcatggtatcgcatgagttcaatcgttttctggactactaccgcgaccgtgaagagatcgagactccgaccgacagccgcgaacgtaacacacgtgacagccgtgaaagaggcagccgcaaggcagcgccgggtttcacccgcttattcatcaatctgggaaaaatggacagtttcttcccaagcgaactgatcagcttgctgaacagcaatacacgtggacgaatcgagttgggacgcattgacttgatgaaaaatttctccttcttcgaagtagaagagaaagaagcacaaaacgtagtgaaggcgttgaaccgcgctaactggaacggccgcaaagtatctgtagaagttgccggtgaggaagcaggagaaggtcggagaggcagtggttctgccgaacgcagaggaggaaaacgtcctttcggaagttcctccgaaaagcgtagtgacagtagccgcaactcacgttccgaaagatcggacagagcaccgcgagctgacagagcgactaaaggcagtgacaagaccgacaagaaaaaaagaagcgacaagcccagccgcgaagaacggggttacggagcacgtggtcctaaaaagacagacgactggcaacagttctttaaagataaagagcctgacttcagcgaggaaggatgggcacgcagaaagccgaaaaagaagtaacaggcaaaacagccattataaggtaatgttggaaaagaagaagatttaaggcgttgatatagtttacctattcataaccgatattgacgtagcatatttattctctatccgactctgctgaaaaatactgaactgttatgcctaatctatatttcagtttttaataaacttcttgatcgtttattagaaacggtatccaagtttattaaaaacgattacatggcttttcgatagcatttatccgaatttatataacaaaacaggctgcaaacctctcaaaagtttgcagcctgtttcttatatacaagctaccgaaaagccttccgaagcaaggcattatcggataaaatgttgtcatattatactatatcagcacaacaaatgcagtataaggtaagatattctcattggtctaagttttaattcatttattgtaaggatacaaatatacaacattaaaagccgtttgtcaagtcttcaggagttttatacgttcatagttcctcctccttcctcagaagcatcatgaacatccttcgtcttgatattcctgtactgcttgggcgtcatctcgaacttctgggcaaatgctttatagaaagtccccctgttcgagaatccggttttatccataatctcttcaatggaaagttgcgttgtcagcaacaagcgttctacaatcgtcaggcgatactctctgatgatgtcggcaggagtcttctccgtgacatttttcagcttccgatagaactgccgggtactgtatcctaatgaactactcaacaattccactgataaatccgtattctgtatatgactatcaataatctgcatcatcttctcgaagaaggatttatcctctttatgcagaaaatgaccatcatccagttcaaaagcacttagaacagagctataatactctttcaggtcctcttcgcgctgtaacagccttctaacgactttctcgagatattccacattgaaaggtttcgtgatatatgcttccgcgccggattcaattcccctcgtctgctcgtcaatattattcagtgccgaaagcagtattaacgggatacggctcaacagtttatccgactttatctttttggcaaacgacattccatccataccgggcatcattacatccgaaataatcaaatccggtaactggatgcccaactgcttcaaggcttcctctgcactgcctaaagagacaacattgtatgccccgacaaatatctccgtaacaaaccataacatagaagggtcatcgtcaataatcataatcgtctgcttgttcttatcaaattcaaccgacgaattcttgagttcgactgcttgctcatctgatgacaaaaccaattcttcagctactttttcatcttcattatccaccgtaacctccataacaggcagccatacatcaaaagtagtcacctcattaggaatactggatacctgaatctgtccattcaacagatttaccatactgtgacaaatggccagtcccaatccatttcgcggagaaatcccattcttgttctgcacttcgaaattatccagaatcttataacggtcgaatattttcgtgagatcagcctccttgattccttttcccgtattagatacccgaatgcaaagttgttctccttcaatacgcagctctaccgtaatggaaccattctccggagtatatttgaaagcgttagaaatcaggttatttacaattttactcagacagctgacatccgtattccaaaaaactccatcttctatctgcaatcgatagttcagtttccggctttccgccagctctccgaatgattcggcaatagtccgtatctgttctgtgacaggaacatgttttatcttcaaaatcttgttccccgtctccagtcggcggaactcaatcagttccaatatcagcgcattcagtttcaacgcattctgctgaatcatggaagcatacttccggacataactgtctacccggctataggaaaggattttttcacacggaccgttgatcaatgtcaacggagtacaaaattcatgggtaatgttagtaaagaaacgcaatttcgattcatacagttcttcgcgctgctggcggttcatttcctcgatcataacattccgctttctgcgataacgttttatcaccatccggatagctcctgcaattaccccggctaataataagaaatagacaatataagcacaagtagtcatataccagggaggagtgatacggatcaataatgaataaggttcactctctttccctgttatattacttcggtacttcactagcaaggtgtattctccaggagatagattagagaaaaccgccaccgtagacaatccgttctcaatccaactatcgctcaaaccgtctatcttataagagtaagtataattgttcccgttaatgtaatcgacagcaataaatgaaaggttaaagaagttctgactatagtccagcaccaaagtttcttgcttcgtagcgccttgcagaaaatcataaatattgcactctttaccaaaaatagagaggcggttgaaatgcaaaggaggcatgtattcttccgaaagttgatcattctcgctaatcgtaatgaatccgttcgtaccaccaaaaaataatgtccccgtctgctgatccttgaagaaagcaccgtcactaaactcaatcacttccaggtcgccctgctgccgatacgtctgaactgtgttttcgcggacattaaacctcaccaacccttgattggtgctaagccacaagttattgtcccttccttccaatatgccgtgaatcgtattgttgggaaagccgtcagtctcgttatataccctatattcgccctgataaagccgggtcaatccgaaactcgtaccaaaccagtatccttcgtcattcttatgaatggcaaaaatatcatttacagtctgattcttcactacatcgtcaatgcggcagggagttagttgattggtatgcgtattcattttatacgcaccatatccacggttaccaaaccaaataaccgaatcattctcctgaaaagagacaaagaaataattggagtttctctttccgccatccagtgtaaagcgacgggcagacttcactttaggtaaaagtgaagtagcatccagaatgattttcacaataccttcaccggcagaaaccacccacaacgtactatcatttgtctcacggacagaatgtacatacttcaccatcttgccatctgccatgaccggaaattcctgtatccgcttttgtgaataggagtagtaattaagtccgctctccgttccaatccataagagtttcctccggctgggagcaaaactatacaccgagttgtccatcaacggactattacttgccaggatcctttctgcccgaggcaaagtttccatatcaggatggaaatcaaacatctttaatattccccctcccttcgtacctatccacaatgtctgatcctgatcctgatatagagcacgaaccggattatctacccgatactccggtacatccaacatgatgttgtcaatagaaaactcatctgtaaaatacatataaagcccttgaccgtcagcgcccacccagattatatcctgaaaccggtctttcataagacaaaagataccggactgaacatttatggactggaggctatattttacctttgaatccggcatatactttaattggattaatccactactcttaaagccgataaaataatcagttttctgttttataatggaagaaacctcaccccgacgaagtatctctgcctccatatctgctataaaatacgctttatgattattcagatcgtattcataaagtgcataagtactgtctatgaaatagagaaaatcgccatctacaaacgtccacaacaacttttccgaatgattcaggcaattactgggaaccagcttcacttgatttccgtttttctctattatataactccggttatcattatccgaagagaatatccaaagtactccaaagttatcaatagccatttgttgtacttcctcaaaatgtatctttttcacatcaagtttacagaagtccttctgctccggctgataataataaatgtagccatcatccttaataataaagaaatcatcttcgggacttatcgccatacggtttatgtatttaaagtctttgaagctttgtatggtctgtctgcgtgtatcaaagcggtcgagcccataattagtctgtatccaaagcacatcgttgtccgcctcgataatccgttcgatgagattaccggagaaactatggtgcacattggttggtttgtacaatcccagataagtgccgtcgtagatattcagcccatcgcatgaaccgatccatatcacgccatgcctatcctgacacatcgaaagaatagcactattggataatccgttcttactggaaaattgccggagactatacgaagcatttatgtctactcctatcaaaagaaaagaaaccagtatcagcagaactcttcttaaaagagtagttctcttcgtccattcattgtgttttttcatatagcattctcttgttttaaatcaagacacaaaaatcgacggaaagatatggaaaatcgggaaaacgtccaagaactgcacaaaaaacattctgatcatctgaaaattaacataacaggagtacgcttttacgacacatatatatatttttgcgacatttcatcgagaagagacatttatgtcatgggtccgtacatcatcttatactaaccacaataactttgcagcatcagacaacggaataaggtaaaaagcaaaataaaaaggattgtagtttgaaataggtaatccacaaacaggtagcatattcagctacctgtattttggaaggaaaatctttagttaataatgaatattatataaaatgaaagcactgcgttttttactaatcatagtttgtgcctactttttggcaagttgcgtttccaccaaacaggcagactctaattcaaatctggatagagcccggcaaacactggattcactttatctaaattattctgtaagcaactctcatctgcttcgtgaaaactatcctttcaacgaacaatataaagtcacttatctggcatcggaaaaccaaacaaacatgcctaatcagttctcctatttatggccatattcaggtacattttccgcagtaaactcattattagaagccacccacgacaagaaataccagcaattattagaaaaacaggtattacccggcttggaagaatacttcgatacagaaagaactcctattgcttactcatcgtatatccgaactgctccgacctccgaccgcttttatgacgataatatctgggtaggcattgacttcatcgatatctatcagattaccaaagaaaaaaaatatttggataaagctcaactcatatggaatttcatagaaagcggtactgatagtctgctaggagatggcatctattggtgtgaacaaaagaaagagtccaaaaacacttgttcaaatgctcccggttctgtattcgccctcaaactatttaaagcaaccaatgacagcctctatttcaaacggggaaaagaattatataaatggacacaaaagaatctgcaagattctacagactacctctattttgacaatatccgtcttgacggtaagataggaaaagccaaatttgcctacaacagcggacaaatgatgcaatcggctgccctactctatcaactgaccaaaaatccggattacctgaaagatgcgcagagcattgccaaagaatgctataattacttcttcacagactttacaactgacacaggagaaagccttaaaatgttgaaacaaggaaatatctggtttactgctgtcatgttaagaggattcattgaactttaccaattggaccaaaacaaaacttttatcgacgctttcaatcaatgcctatcatatgcttgggataatgcccgtgatgaaaacggcttattcagcacagacctaactggcaataacaataatgagaagaagtggctgctaacgcaagctgccatggtcgaaatgtatagccgactagcagctatacaataagtacaaatttaaaacaataaataattaaggctatataatataaaggtcttccgtcacaacacagcacaaaataatagctacataaaaaccaatactcaaaagaaaattaatatgaaacaaaaaagacttacgtttttactcctgttaatctccaaccttttttgtgcatctgctcaaaaatggtataaaccagagattgatctaaaagttgaagagctactgagccaaatgacagtagaagaaaaacttggatatatcggtggcattgactggatgtacactaaaagcattgatcgcctgggtattcatcgcatgagaatgtccgatggaccgcaagggataggcacaaaaggcaagtctaccgcatacccggctacagtgacactagcagctacttggaacgagaatcttgcctatcaatacggaaaagctttgggacgtgattgcagagcaagaaacatcaatgtcatattaggtccagcggtcaatatctaccgtgccccaatgtgtggacgtaactttgaatatatgggtgaagatccgtatttaacatcccgtatctgtgtaggatacatcaaaggtgtacaagatcaaggtgtcatggctacagtcaaacacttcgttgccaacaactccgactatgaccgtaataatatcagtaatgatattgatgaaagaaccttgaatgagatttacttccctgcttataaagctgccattcaggaagcagaagtaggagccatcatgacaagctataacttgatgaatggcatctacaccactgaaaacccgtggctattgaaagaagtactcagaaatcaatggggcttcaaaggactagtgatgtctgactggggatcgactcattactgtgttccagctgcaagaagcggattagatctggaaatggcaggaggagaaaagatgaatcctaaagatatggcttactatcttaaaacaggagatgtgactatggatatggttgacgaaaaagtacgccacatcttacgcatactcattgctttcggattcaaggatggtacggaagctgacaaaagtatcgctctggatgaccctcaatctgtagaaacagcattaaatgttgccagagagggacttgttcttttgaagaatgaaaacaacattcttcctatcaatccccaaaaatacaaacatattatcgttaccggcaaaaatgcacatggatatgtacatggtggtggtagtggcgctgtagttcctttccattataccaatttattcgacggaatccaaaaagaaggtaaactgaataatgtaaaagtagaatatattgatgaactcgactttatgccgtccatcatgtatacagacgacaatctcaacgaaaagggatttcatgccgaatacttcaagaatattcacttcgaaggagcccctgtggtaaaacagactgagaaaaaaatcaattattcttgggctgcaggcacagaattggaaggtatgcccaaagattatttctctgtgaaatggtacagtacaatgtgcgtagacgaaaccgctgactatgagttcacattaggaggcgacgatggttataaattgtttatcaacgaccaaccgattattgatgactggacgcccggaggtttcagaacgaccaatgttaccaagacactaaaagccggtgaaaaatatcatgtacgtgtagaatactatcagcagggtggtggagcaggtatctgctttttatggaaacgtaagaacgagactcagaataagtttgccgattacctgaacaaagcagatttagtgattgcctgcttcggtcatagttccgatacagaaggagaagcaagcgaccgcacattcgaactgcccgaagtagataaaaaaatgctggccagcttatccggatgtaaaaagcctgttatcggtattgtaaatgccggaggtaatattgaaatgcaaaaatgggaaccgtctttgaaggggcttatttggggattttatggaggtcaggaagcgggaacagctatcggcgaagctttattcggtaaagttaacccatcaggaaaattacctatgacttttgaaaagaaatgggaagacagccccgcttacaacagctatcatgacccggataaagacaaacatgtagcatatacggaaggaatattcatcggctatcgcggctatgacaaattgaaacgtgaagtacaatatccttttggctacggattgtcttataccacctttaagctatctaatatagtagtctcaaagccaaatgctgatggaacagtagaagtaacctgccgtcttgccaacacaggaaaaagagatggtgcacaagtcatacaagcctatgtgggcaaagcagaaaacagcccggtagaacgtccccaaaaagaactgagaaaatttgaaaagatattcctgaaagccggagaatccacaactgtcaagatgacattacctaaagaatcatttatgtattttgatgtcaacagaactcagttcgtcactgatccgggtatttacaatataatgcttggcttctcctctagagatattaaagcacaaaaaaatattcaatatacactatagattgcataatcaataagtaacatgaaatatacttgtatcaaaactgtagcaatttacttgctcgcaaccttacctttattggcgaacgcctcaacacacaaggtaaaaattacacatagcgtcatggttggggacggaatcgcaaaattcatcccggaaggcttcgacgctcaaaagataccttcttttgcaatagaaaaagaaccacgcgaacaaggagcacttcctgccgactgggtacttgttcccgagttctcactcacggatggtaaagcaaacgcatcattaacagtgccggaaggtacaagcatctatggcggtggtgaagtgaccggttcacttttgagaaatggaaagaccatcaaattatggaatacagactcaggagcttatggtgtagacaaaggtactcgtctgtatcaatcacatccttggatgatgggagtgcgaaaggacggaacagcttttggaattttattcgatactacttggaaagcagaactaagcagtacagacgaaaaaatcgaattaaaaagtgaaggaataccctttcgggtattcatcattgacagggaatctccacaagcagtcattcgcggactatccgaactgaccggcacaatgccaatgattcctcgctgggcactaggttatcagcaatgccggttctcatattctcccgacagccgtgtcattgaaatagcagatactttcagactaaaaagaataccatgtgatgttatctggatggacattgattatatggacggataccgcatctttacctttaatccgaaaagttttccgaatcctaaagcggtgaaccgtgatttgcacatacgtggattccattctgcatggatgattgacccgggagcaaaagttgaccctaactatttcgtatataaatcgggaacagaaaatgacgtttgggtgaaaacagcagacggtaagaacttccacggtgatgcatggccgggagcagcagcattccctgattttacttctcctaaagtaaacaaatggtggagaaacttatataaagattttctagcacaaggagtagatggcgtatggaatgatgttaacgaaccccagatcaatgatacgcccaacaaaacaatgccggaagacaacctgcatcgtggaggaggaaagcttccggcaggtacacatcttcagtatcataatgtatatggcttcctgatggttaaagcatccagggaaggtatactggatgctcgtccagaaaaacgtcctttcattctgacacgttccaacttccttgggggacaacgttatgccgctacatggactggcgacaacggttcttgctgggatcatctaaaaatgtcagttcccatgtcattaacattgggattatccggtcaaccgtttagtggtgcagatataggcggtttcttattcaatgctgatgctgacttattcggcaactggattggtttcggtgccttttatcctttcgcacgtggtcatgcttgcgccggaacaaacaacaaggaaccatgggtatttggacaaaaagtagaagatgcctcacgcatcgctttggaacgtagatatatactactaccctacttttatacactcttacacgaagcctcaactaatggcatgcctattatgcgtcctgtcttcttctccgaccctaaagacttgtcactgagagcagaggaagaagctttccttgtcggtgataatttacttatcattccagcatttgctaatcaaccggcacttccgaaagggatctggaaagaactgtcacttgtagaaggagatcagaatgataaatatcaggcaaaaatgaagattcgtgggggagctatcattccgactggaaaaataattcagaacactacagaaaattcattagatcctctgacattactagtgtgtctggacgaacagggcaaagcttccggaaatatgtattgggatgcgggagatggttggtcttacaaaaaaggggactatagcctgctacaatttgtcgcagagcgaaatggtgataaagtgactgtaaagctaacaaagaaaaccggaaaatacaacactgagaataaagacatggcagtgattaaaattataacagatcaaggcatacgtcaagccagtggaaatctagtggaaggtattgaaataagactataaaaaagcactatactttgtttggaaacctaaaaaaaaagttttatgaaaaaagagcacatgaaaaagcaatatccccattggtgcggggtattgctactgtatctgatggcatgtattagtagttgccaagacgacaaaatcagttctagcggatatgatccgtctaaacctgttgtttttacagatttctctccaagtcagggaagtctccgtactcagctccatatctacggtgagaacttcggaaacgacccatcaaaaatttatattactgtaggagggcgaactaccactacaattggctgtaacaataatgaaatttattgtatgatacccccaaaagcttttgatggaaatataaaaatatctatcgaaagtgctgatgggacgtcttcacccatagaatatgaatttgagagacgtttccaatatgtatctcaaacttcagtaggtacattagtaggaaacgaagatgaacaaggcaattcttctgatgtagatggagattttgaaaacgcaaggttcggaaatgcagaatggttgttaatggatacattcggaatacaaaaatgcttgatcgttaatggttttaaaggacctatccggagaatcaatctggaaactcaagaagtatccacacttatgactgaagggcaaggattgtttggaggtatgtactacatgtgtttcgatgcgactggagacactttatttgtatcagacgaccacggacaaagtaacaaagaccgaagagagattgcctacctgctacgctctgaagacttccgaagagcaagaccttatgtttatgatcgtactggatatagttgcgcttatcaacctttgacaaaaactctatattataccgtttattggcagggaactattgacaaagccgtttttgacccgacaacacaaggaatggtagcaaaagaagtattcccaacatatgaaagcaggaatgaacatgcctacctaacagtacaccctgaaggtaaatatatgtatattacaggagcaaattgcctttataaatccatgttcaatccagaaacaaaagaattccaaaagccaacaatgtttgccggttctgaaggagccagtgattgggtagactctcccggtacatcagggcgtttcgtatggccttatcaaggcacatttgtaaaaaacaaggattacatagaagctggtaaatcagatatttacgatttttatctttgtgatagaaacggacattgcatccgtaaaataactcctgacggtatcatctcgacttatgccggcagaggtagtgtatcttctgatggacgagtaaacggatacatagacggcgagctacgcacagaagcacgtttcgacagtccttgtgggatcgcttatgatgaagaaacacaaacattctatatagcagatagagaaaaccatcgaattcgcacaatttctgtagaataaactataaaaacacatttcgaatgaaaaaatatattttaagtttgttttttctaattagctgtgtgcttaacacatacgcacatacagaaaaacaacaacaagaaaaaatagaaatcagcggcattgttctggatcagaataaagagccacttgtcggagtaaacgtttccgtaaaagacatacccggactaggtgctattacagatataaacggtaagtttaaaataaaggttgaaccttatcaatggttagtattcacttttataggatttgataaacaagaaatacttgttaaagaacaaaagagcatcaatgtcattatgcaagaagcaaaagcaactgctatcgacgaggttgttatcacaggaacaggcgcacagaaaaaaattacaatgactggagcggctactacagtagatgtaaatacactgagaacttccacttcaagcattacaaatgcgttggctggtaatgtagcaggtataatggcacgccaaacatctggacagccaggcaataatatatctgaattttggattcgtggaatttctacttttggtgcaggttcgggtgcactagtattaattgatggattcgaaagagacatgaatgagatcaatattgaagatattgaatcatttactgtattaaaagatgcctctgcaacagcaatatacggttcacgtggagcaaatggggttgtattgattactactaaacgtggtaaatcaggtaaggttcaaatcgatgcaaaggttgaaactacttacaacacacgtacatatacccccgaacttgttgatggctatacctatgccaacttaatgaatgaagcacgtactactcgtaataaggaagcattcttctctgatgaaaagctatacatactccgcaacggattggacaaagacttataccccaatgtagattggatggatgtactcttaaaaaaaggggcaccaacttatcgagcaactttaaatctgaacggtggtggctcgcttgcccgttattatgtatctgttagttacgtagacgaaggaggtatgtataaagtggacgaaggattaaaagactataacaccaatgcaaattacagacgttggaattaccgtctcaacgtagatatggatatcacaaagtccaccttattgaaagtaggagtcgcaggttcactagataaaaaaaacgaaccaggaatggcaggaaacatttgggcatcagccatgcgcaacaatcctatctcagttcctgtgatgtattccaacggatacgttcctgcctacggttcggagaatgatcaactcaatccgtgggtagccgctacacaaaccggttatcaagaaacatggaacaataagttgcaagccaatgctactttagaacaaagcctcaactttattacaaaaggattaaaatttattggccgttacggatttgacacaaacaactatcagtggataaaccgtaaaaaattccctgaaatgtggagagcagaacaaaatcgtgcttctgacggaagtttagtcatgaaaaaaatcaaagacgaacaactaatgacacaagaatcatcttctaacggaaatcgtaaggaatatctagaagccgaactgcattatgaccgtacctttggagaccacattgttggagcagtatttaaatattctcaagacaaaacgatagatacctctcagaatggaaatgatattatgcaaggtattgataaacgccatcaaggacttgctggacgcttcacctatggatggaaataccgttatttcttcgatttcaactttgggtataacggttccgaaaactttgcaccgggacatcagtatggctttttcccagcttattctgcagcatggaatattgcagaagaacctatcatcaaaaaacatttgaaatggatgaatatgttcaaactccgttattcatatggcaaagtcggcaatgacgtcgtaggagacaatgaccagcgtttcccctatttatctaccttcggtgccagtgggggatttaattatgcggacatcggacaaaaatatgaatttacaggtttaagctacacacattacgctactacagccgtaacatgggaaatagcaactaaacatgatattggtatcgacttctctttatgggacgataagttcactgggacaattgactatttccacgaacaacgtgacggtatttaccaacaacgtaatttcattcccatttctgttggtctgaacggagctatgagaatatctaccaatattggctctgttttatccaaaggatttgatggaaatttcggattcaaacaacgtatcggagatgtgaacctcactttacgtggcaacttcacctatagcaaaagcgaaattttggaatatgacgaagaatatagcaactacccatacaaaagccagagaggtttccgagttgatcaaacccgtggacttatcgcattgggactatttaaagattatgatgatatacgcaatagccccaaacaatcttggggagatgtaatgccaggtgatatcaaatacgcagacgtaaacggtgatggttatgtaaatgataatgatatagttcctattggagctacaacacgtccaaacttagtttatggcttcggtctctccggacaatggaaaggtattgacattaatgttttattccaaggatctggaaagtctactttttgcattgatggtcccactgtatatccatttgaaaatggagactggggaaacattctaactgatgtagtaaaatcaaaccgttggatattaggtgaaaatgaagatccaaatgctaaatatcctcgtttgagctatggaggaaacagcaataactatcgcgcctccacttattggttgcgtaatggttcttacctacgtttgaaaaatttagagataggatatacaataccaaaaagtcttgttaataaaatgcatttaaataacatccgtatttattttatgggtaccaatttagttaccttctccagtttcaaactttgggatcctgaattaggtagcagtaatggacaaaaatatccactgtctaaatcatatactttaggattaactatcaatatctaatatcaaagacatgaaaaagaaacatatattattagccattgcgttcagtattggactaggagttagtttatcttcctgttcagactatctaagtgtagaacgtttcttcaacgaccgacaaagtgaagaaaaaatcttcaaaagtaaacaatttactgaagaatggttagctaaatgctatgggcttttaaatggttcgaatatagaatacggacttatcaaatttacactctccaattattcggacgatattatttttaatgaaagcgatggtgctgtaaattacaacgctcttaaatttggacaatatgataacggttgggtaaatgactcttatatccgttgttatgaaggtgtacgccaagcttccatcatgatcaataatgtagatattaacgaagaattgacaaaagaagagatcttagacaaaaaggcacaagcccgtttcttaagagcttacttctattggttactacttagaagatatggtccagtacccttaattcctgatgaaacaatcagtattgatgaaacatatataggcatgtcctgtccaagagctacatatgatgaagtagtagactatattgataaagagatgatacttgcagctaacgatctgcctgacagacgagacagacaaaatattgcgcgggcaacaaagggcgcagcactagctgtacgtgcaaaagttttattatactccgctagtccactcaataatccattaccaaatgatcccgataagtttacagactttgttgatgatcaaggccgtatattaatgtcacaaacatatgatgaaagtaaatgggcaagagccgctgcagcagcaaaagatgtaattgatttaggtcgttatgagttacatatcgcagactatcaagataaaggagacaatacttatccagctacagttaagcctccatacaacgcaaaatattctaccaaaaactttcctgatgggtgggcaaatatcgatccgtttgaatcatatcgttcgatttttaacggagatttatatgcaaatgaaaatgaagaattaatctttactcgtggtaataactctttagcagatcaagtgaattatctcgtcagaaatcaaatgccgacctttgcaggaggagagaatcgtcatggtttaaccgctaaacaatgtgatgcttacgatatggcaaatggtgacgcctttaatttgcaacatttcttggacacttgcgacgcaagtaaacgttttgttaccgaagatgaatacaaagcaggaaaatatccgcagcttcgcccgaatgtatggaaagaatatgccaaccgagaaccgcgcttttatgccagtgtagcatttagcggtgctttttggccatttgccagtgccaaagatgcagaatatcgtaaccaacaaatatggtattacagaggcaacaaagaaggacgcaaaaacggatctgataaatggataccaactggaattggaatgatgaaattcatcaatccaaatgattgtaatacaaataatggaaagatctatgataaagtagatgtcgcaattcgctatgccgatattcttttgatgtatgcagaagctttaaatgaacttactccaggtaatagttatgaggtaacaaactggcaaggagaaacgatggtagtttcacgcaatacggaagaaatgagtaaatcagtctcaagagttcgtattcgtgccggaatgccagattatgaacaggaagtatataacgaccaaacattattccgcaaaaaattaatgcatgaacgacaagttgagtttatgggagagaaccagcgctaccacgatttaagacgctggaaaaatgtagctatcgaggaatcggagcagatctacggttgcaatgtattaatgacagaagctactaaagaaagattctatgaacgtgtaagagtcgagaatctacaagccaacttctcacgtaaaatgtacttctggcctattctggaaagagagctacagtggaatagacggatgacacaagctcctggctgggaaactttcgattaatataaaaagaagataaaaatgaaaagaagaataatttatatagttacaatgtttgctgcactatctttctttagtgcatgtaatgacgaatggaaagacgaactttattcacatatgatctccttgaaagcacctataggcagtgaagaggtgtctgatatctatgtacgatacaaacctaacggagaagttgtatatgatctcccggtgctagtcagcggatcaaccccattagatagagacttgaatgttcgtattgctgtggacccagacacgctggttgctctaaatctagccaactaccatgagttgagaaaagatttatggtatgaattattacctgagcaaaactatgaatttacagcacctacctgctatatgcctgcaggcacaagaaaggaattattccctatcaaatttaagttttctggactaaacctgtcaaaagaatgggtattacctctgaccgttgaagaagatccttcatatgtgaccaataaacggaaaggctggcgtaaagcattactccatgttttgccatataatgattactcaggcaattattctgcaacagcaatgaatatttattttgctggctctaatgacgatccattagtagttgataatcgaagagcacacgtcgttgatgaaaatacagtatttttctatgtcggaacgaaggaagataactcaatcgaccgggaaacttacaaaattaatgtcaagttcgaaaaacctatagaagaaactgaaacaaaaaaaacaggtaatctgacaataacagctaccaacccggcaataaatttccaaataataggtaatcctacctatgagatttgggatgaaatggatacaaatcagccttatctattgcatcgttatcatgtattaagaatggaatatagttatgatgacgtaacctcatccaatgttcctacttcgtacagagctagcggttcattgctcatggaacgaaagattaatactctaataccagaccaagaccaagctattcaatggtaaaaatgcaatattatatccctactcaatgaaatatatcaagtcaatggtttgattctatactaaggagcatttaaactatatgctcaatctgattggagaaagaataattattgccaaataaaaagtgacacttagcttagttagcaacttcgctataagtgtcactttttattcataaacagccttacttagattaaaaatacttatatttggcaaatttaattcataaagaaataactcatattataaatataacatattgatgatctaaaacaatgagaaagttactcttattattcctatttatttgtggattagtgctacatgcacaagcacaaaagaatgtagaattaagttccccgaacggagaaataaaagtatccgtccgcctcaccgacaaaatctactatgacgtagcctgcaatgatgaagttctgttgaaagacaattatctccaacttaaactaaaagataaaatattgggcgaacatcccaaactgtccggacaaaaacagaacaaaataaaagaaaccttaacccctgtcgttccactgaaattttcaacgatcaataacgaatataaccaacttctactcaattttaaaggaaactactcagtagaattccgtgcttttaacgatggaatagcctatcgttttatcacccgccaaaaaggagaaatcgaagtattgggagaagacctttcattgcagttcccgacagactatttattacatctccaacagccgggagagttcaaaacagcttatgaagagccgtacacacacatttccagtcactcatggaaaccatcggataaaatgtccgtacttccagttctcattgatacacgtaaatcatataagatactaatcagtgaatctgatctgtcggactatccttgcatgtttctgaaaggaaacgggaccaatggcatatcctctatttttccaaaagtcccccttgcatttggtgaagacggagaccgcagcctcaaaatcgaaaaagaagcggaatatatcgctaaaacaagtggaaaaaggaactttccatggcgctactttgtcattaccaaggaagacaagcaattagttgagaacactatgacctataaactggctgataagaatcagttagaagatgtgtcatggataaaaccagggcaagtaagttgggaatggtggaacggagcaaccccgtatgggcaagatgtaacctttaaagctggttgtaatttggaaacatacaaatacttcattgatttcgcatccaagttcggaatcccttacattattatggatgaaggatgggccaagagtacacgcgatccttacactcctaatccggacgtagaccttcatgagctgattcgttatggaaaagaaaagaatgtgggtattgtcctttggctgacttggttaacagtagaaaagaattttgaccttttcaaaacattcaatgaatggggaataaagggagtaaaaatagacttcatggaccgcagcgatcaatggatggttaactactacgaacgagtagcccaagaagcagccagacatcatttatttgttgacttccatggatcattcaagccggccggactggaatacaagtatcccaatgtattatcctatgaaggggtcagaggtatggaacaaatgggaggctgtaagccggagaatagcatctacttgcctttcatgagaaatgcggtaggccctatggattacactcctggagctatgatcagtatgcaaccgaatatctatcgttccgaacgtcctaactctgcaagtatcggtacccgtgcataccaaatggctttatttgtcatattcgaaagcggtttacaaatgttggcagacaatccgaccttatattaccgcaatgaagattgcactcgtttcattacccaagtacctgtaacatgggatgaaacagttgttctggaagccaaagtaggtgaatatgtaatcgttgcgaagcgtaaaggagagaaatggtttattggtgggatgactaatgataaggaaaatgaaagagaatttgaaataaatctcgacttcctaaaagatggcaagacctaccgtgtaacctcgtttgaggatggaataaatgcaggatatcaggcaatggattaccgtatgaaatcggcaacaatgaataagaatcaaaagctttctgtcaaaatggctagaaatggtgggtttgcagctgttctcgaataagcctatactgtagaaatcaagatatctcccataaaaaagagactgcctccaatcaaaaaatgaggcagtctctctttttcataacactctttatcgcttttcctattcaaccaagagaacctctaactctgccacagcagccatcttagcctctttaatgacagcagacagagcctgaagttttacataacgtgctttacatggattaaattcaactgtctgtacttcctttgaatcggcaaatgtaccagaagccacagcttttccccactccttgccatcatggctgatatacacttcatatttaccgattctaccttccgaagaatcctgacgaggtgtatatttaagaccttttactgtagtttctttagctaatgcaatctgtatctcatgaggataaggagccagatagaactggttatgtaccgtatgccagaatgtattaatatcaccatccgcagccaatttcatacttccatcagcatcactatccacatatacaaccttctgtctctcttcagatgcacccgataaattacggactgcattgacatttaattctgctgccgaagcccaatcccgaccataaatttcagataaagcaatcaatttaaagtaacgtgccacaattggtttctccaatgttacaaactgtgcagaagatgaattttcaaaatgacctttagtcttgttgtcccagttctttccatctttactgaaatagagttcataatccttgatacgtccgttctcagagttacgaggttgataaataaacttatcaatctcaagtgatgaagacatatccactactatttcgtggggatgtttagccacaggatcattccaccgactatgccagatagtattcagatcaccatcgattgcgttacgggcctcttcacccccattctcactactaactgatacaattttccacagtgaacgatccacatatatcggaaattcagctgaagttcccgcactttttcctaattgttctgaaacggcatatgcttccacatgaccaccagaaataaattcgaaaggttcagtatatatcttctcttctccgccattcagactataatgaacagtagctccgggagtattagtctttaaattcaaataaccattgttatctctttctatcaatacaggcatacatacgggcatctgtacgcgtgccttctttataagttcttctgtcgaataacttctctccaaaggtagtatgataaaactgaaaacagtaggctgggaacgaagttcatacttttgcatcgggccaggaccacaactggcattaccaagtggacgctgattagcatccagacaaagaacagtttctttacgcatcggtacttcatacttatgaagcaacctacgatgattggcagagtcaaccatatcctgcgctgttgcatgcaaagcagaagcagacatcttatcacctgcaataaagacaaagcctattccatcaggattggttattgaaatccaacgcagatcctcgcgattacccatttcctgtgctctgacatagttcacccattgatcagatactaactcatcatacacgcctacgtaagtggcatcttttcggtcaacatagttttccaacggtccgcgaccataccaacgcatgcgttcaaagccttccggaagttccatacgataaccaatacggggaataattacaccttttgttgaaggaataatagtgctattaaccaaaatagaaccatcggcagccaccgtatattctatattagttcgataatcaaaacccgtttttccccgatatagattctctatctgcagagttaccttattatcttctttccgcacattccaatgtccaggttcaagagtcatctgatacaagcctttctgataccagtcaccatccacttgcttatcattatcagtaggagcacggaaagcattcaattccaaccctttactaatcatgggcaattcatttaatgtataagaagagatcgttccctgctgctttgaaaaagacgcttcaaactgcgagccttttaccagatatgcatcatcagtctctatcagatcaatactaccttctcctgctttaaatacaggcttcgcactatcagaaagtttgaattgctctgatgctacctcatatccggccttttcccattcagtatcttgcttttgacagaagcgaaactttataaagtattcggctcccggaattttattgatctgattatcagctatagtaatgaccttactgtcctgtgcgttcaaggacaattcttccagattagccgagaatacaacttttccatcctcttcaatctcataccttccatataagtcatccaaccctgcatgaaatctcttattagtcagtttatacgtcccatttcccatagcctcaacccatacaggctgatgtatttttttcacctcgtatgccttggcagagtatgtacgatcggaaaagattacgccattcgtgcaaaaattaccgtcattcggtgtatctccaaaatctcctccgaaggccatataataaccggaaccatccggagcaggcatcttaatactttgatctacccagtcccagataaagccaccgacaagtgcaggatagcgctcataagtttcccaatattccttgaaattcccgattgaattacccatcgcatgagcatattcacaaaccacatgaggtttgaccgtttctccattctggaatttctgtagacgctccttccctacgctttccagccattgcacatcggggtacatagaactagttacatcgcaataagagctattaccttcatagtgagtaggacgagtatcatcgagtttcttaacagcctctgcagcagatttaaagttaatgccattaccggattcgttgcccaacgaccacatgactatagaagcatgatttttatagcgtcgcaccatattctcactgcgttccgtaaatgctttcacccatgaaggttcagaggacaatgccataagaccatggcattctacattggcttcggaaagaacatatataccatatctgtcacataaatcatagaaataaggattattaggataatgagaagtacgtacagcattaatattcaatgacttcatcaactgcacatctttttccatttcttctttagataccgtacgaccattctccgaactatggtcgtgtctgtcaactcccttaaacaaagttgattttccattaatcaacagccgaccatcttgcgctagttcaatcttacgaaaaccgaccttgacactacgaatatctacagttttccctttttgcttcaaaagaatagtgagattataaagattaggtgtttctgccgtccatttcaaaggattcacaacctcaaactggagtttattcgttcccgttacagcacgcgtattttgggtagcaatctctttaccattctgatccgtcaccttcacttgaatctcgttattactttttttacctgtaatatctatatccagagagacggatgcatttttatactccttgtccaaatccgtacggaagaaaaagtctctgatttgcgttttaggagccgaccacagaaatacatctctgaatataccgctgaaacgccagaaatcctgacactccagaaagctaccatctgtaaagcgatacacctcgacagcaagaacattctttccagctttcagataaggagtcagattaaattcggcaggcaggtagctgtcctccgaatagccgacctttttaccattcacccaaatataaaaaccggcttctaccccattaaaacgaataaagatgtcacgtcctttccatgaatcaggcaatataaactccctgcgataactaccgacaggattaggcatcgtcgcaaaagtatagttagacggacgaggttgaattacattaggccactgaatctttttccaatcccactcacaaaaaggataaatcacattgcaatataagggcttatcccagtttttattatgtcttacggcctctatctgccaggttgcagggactttaatattatcccattggcttacatcatattccggtttacagaaatcctgcggtcggtctttcggatcagccacccagtgaaatttccatattccattcagcgttttgtaataaggtgactcttcaatagtcagattcattgcttgttgttcatcagtaaaaggaatagcaatctgaactgcttcttccttattgactcccgagaccagctcattgctccactccggcttatccgtggtttgtgctgttacagataaagacataaacaaaagtgcaatccatgcacttcgcatgattcgtagtttcataataattgattgagttatttagtttaaatgttcttctataatattttcctaaaatttattcgattacaaatgtagcggcttttacctatttcataccataaatttgtgacattattatacacatttatcaaatataaccgaataatcttcactatgatcagattatttcctaatttgaacaatcgtttacaccttttcttcttttaaatctctatttttacaatcagctaaggcacttaaattatacaataacaaaaattacaaaacatgagaaaagcacatctgatgctagttggtttactactctcttttgcagcaaacgcaaccaatgatattccccggccggaatatccccgcccacaatttgaaagaactacctgggttaatttaaatggtacgtggacatatgaattcgatcttgatgattccgggaaaaagcgtaacttacctacggcaaaggagcttagcaaaacaattacggttcctttctgcccggaaagcaaactatccggagttaatcacacggactttataaaaaaaatgtggtatcaacgttctctgccgatacctgctgactggagcaacaagaagattttactccatttcggcgctgtcgactatttagcagagatttatatagacggacgccttgtcggttttcataacggcgggagctctccttttgtaatagatatcagtcgcatagccaaacccgggaatagtcacaatctggtagtatccgtgtccgatgatgcaaaatcaggtcgtcaggcatgcggcaaacagtctccggagaaaaactcctttgcctgtttttatacgcgtgtcacaggtatctggcaaacggtgtggatggaagctctctctccctgtggactgaaatcggcaaatacctatccggatattgacaataatcaattgatcattactccggaattctatcagatatccaatgaccagacactggaagttacgatctatgacagccagaaaaaagtcgctcaagtgacatcaaaatgtgccaatggcagtaacctgatcttaccgataaagaatatcaagctctggagccccgaaactccccacctttacgatatcagttactgcgtcaaagatgccaaagggcagatcatcgatgaggtaaaatcatatgtaggtatgcgcaaagtgcatatagccaatggcaaattttacttgaataacgagccttatttccagcgtctggttatgaatcaggggtattatcctgatggaatctggactgcacctaccgatgaagcccttaaaaatgatattttactaagtaaggaagccggcttcaacggggcacggcttcatcaaaagtttttcgaagaacgattccattactgggcagataagctgggatttatcacttggggagagtctcctaactggggaatgaatcccgatgacgaggtcgcatcaagaaatcttctcagtgaatggatagagatactcgaacgagaccgtaatcacccttctatcatcacatgggcacctcttactgtaccattgagcaatgtttcgtccggtacatttgcacgcctggtatttgacctgcaaaaactgacaaaagcaatcgatcccagtcgcccgttcaacgaccttaccggcagtggattccatttcctgacagatatctggagcatcagtacttacgaaccggatgcaacacgtttcgcactaagcttaaagccggacaagaaccaggcagcttatgccaaccaaccttttatcatcggtgaattcggtggtattgtatgggagacatccagaaccaaggaagacacatggggacatggaggaacatttaccaacgaagatgccctcttcgaacgcatcgaaaaactcatcaatgcgattcaatcctccggaatcatcagcggactctgctatacacagttttcagatatcgaacaagagaaaaacggtatctacacttacgaccgacagcctaaatttgatatggaacggattagatctatctttgaaaagattccaagcagaccgataaagaaataagttcagcttgctaatagtataattcagcccgtcaatatattcaaatcgaattatatcgacgggctgaatatccctttaatcagggtgcaaccttaccgtttactctcaatatattcaatcgcttttctaatccacatatcttctcctgcagctatatcttctacagtctgttccaccgaaatatcaatagtcactccatcccgttgatttaatttccattcaggatagaatgctcccgccattgtataggtgaatttaattccccgaggcaaatataaatatccgacatgaccgttcgcaccggcagtttgcgtaccgataaccgcacttttgggtgccactctataagcgacagacattagctctccaaaactctgagtcatctcatttacaagaatagcaatcttacctttgaaataatcaggattttctttaaaaccaatttttccaattatatcaagaccaaagttacccggaaatttcttcgaattaatggaataccacataaatgtagttggttgaggataaaggtattttccaagtacttccataatatcccatctcggatacttacgcatatccaatatcattcctttggcattcaaatttgttttcatcatctgatccagttccggaagccccattatacctgcatctacataaagaatctttctggcatccagtccgtaatctgacggactcttccgacctttaaaagatgctctttcaaaagactgcatgggtatcgcatattcataggactgcccttgattctccactgtgactttcatttcattctccgatgtaacaaatagtctgaatgcgacattcctcagtaaaccatgctcatttgaagaaggcaatatagaacggtaattgtcgattatttccgagatcggtttatcatttacagccagtatgaccgatccacgctcaatctgctttaatgcagttgattctactacaagcttaccgtccgttgtctgagtcaatcccaatggaagaccatacaatcggggagcatgattcggaaattcaagccctccatgtgaatcattgatttcagcagccagttttcgtatagaatggtccaaatctttttccgaagaggcattgataaattcaggcagatattgcgccagcagagtactccatctatggtctgtaaggttggcgtaaggatatccatgttcgatggcattccacaatctataaaccgtaagaatacgatatccctgatcttcccaatcgattgaaggataaggtttgtctctggcaaattccacctcctcctttccggttaatatcggaagatagtagttcaatacactattacgtttggcattcttgattctcactagtttttcagacagtttcttatcgaagacattcggatcttccagccagccaagctgtgcaaaacgatgatattgggccgaatctccgattacatactcctcggtttccgtgattttaccgtacttatctatccattcgtttaacagtgagttcctttcctttttgctcttcgcagctgctatcccgggcatcactctgaacaattcaaaatcccagttatactttccaaccacaacctgcggatgaaaatacttaaggaatccccaaaccttgcccaaaaccaccaaattttccaatgtttgcccgtcaacgtctccaagcgatattcctgaatttcctgcgaactccagatccttgtccacttcaacatccggattcttaattaaatcaagtgactgtccatctatcagcacctggcagtcgttcacccaaagcctggcctccccatcacagagtattcgaaagaaaaatttcttggaacgtgtaaacggcatttccacacaaaagtctttccagccctgactgccgttacattccaaaccaatagccttctcgtctattctttgaaggtgggtatccagtttaattgcgaaactcactttggcattatttgcctgctgatatttgtatttgcctttaaacacaatcgtcttacctgtaatatcgcggttattcatgccgaaataagcttctgttttctttccccgtacagacggaatcaacaatgacgactgattattaaagagcacttcttcatctacccgaatatcttgattttcactataccaagccatcttaggcatttcccgcattggatcaaaggaaataatacgcgtaccggtaaaagtaagaagtccctttttactttgatcagactgcgcatataagttaaaagcaaccaacgcgaacactaataagccaactaatctgtttttcatatgtatcatagttttgttgtcaattcaaatatttacaggtttgtactctggacacaccaaaggtcagaaaaaagaaacactaccagagaaaatatctgttcataatttagcaatatctgtttatttcaaccctaaacacatgttttagcgaaaaattcgatatactcaacaagaaaacagagacagcttcatacgtttcggacgtaatctctattttataattcaaacataatatcatcttatctattatgagtatctttgcactccgaatatatacttaactatgaataaagtcaacggtttcctgtacggtctgctttcgtcggcctcttttgggcttatccccctattcaccattcctgccatgcaggcgggcatgcaattcgaatcgatactcttctatcgcttcctgtttgcgtgtatggcattaggcgggattctactgatcaacgggcaatcctttcgaatcagcagacgggacattccttccctgctcctgcttgcgatactttatctgatgtctgccgtcttcctgttctggggatataagtttatggcaagcggtgtagccaccaccattcacttcatgtatccggtactgactaccctggtcatgatgctattcttcaaagaaaaaaagtccggttggcggatagccgccatcgcctctgccgtgataggtgtctacttcttatccggtggaaatacagagacaggaagtttctcatttttcggccttttcatcgttcttttatcagcattgggatatgcactgtaccttgtcacaatgagccagttaaagatcggccggatgaaaggattactgctcactttctatgtctttcttttcggaggaatctttctctttatcggaaccagcagtatcagccatcttcagcctatcagagaatggcatactgccggaaatctaatcttgctggcattgatcccgaccgtcgtttctaatcttgcactggtcagagcagtaaaaagcatcggctccacactcacctctgtattgggagctatggagccggtaactgccgtatgtgtaggcatcttcctctttggagaagcattcaccacaagtattggcgtaggcattgcactgattatcgttgctgtaatggtaattatactgaaacgataagagcagccttcttataagattgttttccgtttcagcgggttaatttcagttcttcaataagattagcagcctttccatacttttccataatgaaaagcatatagcggacatctactccgatacaacgctgcaagtccggttcaaatacgatatcactgctcatcgcttcccaattaccgtcaaaagcaagaccaagcaattcccctttcgcattgaacatggcactgccggagtttcctcccgtaatatcattattcgagataaaacaaacgttcatatctcccttttcatcggcatatctgccgaaatcaccggaagagagtaaagccagaagatccggttgaacagcaaagtcaatatcgcctgcgtgttcctttactttctcgaaaataccttttaccgtcgtataataactaaaggtagccccgtcaaaaggagaatatccgcagactgtaccaaaactaaggcgcatggtggaattagcatcaggatagaagttacggtcggcatacatacgacgcatagcggcattgaacaggcgttcatcctgctctatttgttcggaagcctccgagacgctctgattcatctcatagtatttcactatcaggtcgaggcttaaagaaatggcagggtcttcgatgagattataagtcgtatcacgttcaaggaagcgcttcagtcccttcggggaagtgatttgagaggtagcatacaaagagtctacataagtctggacatttccgttatacaaggtgtctatttgcagatacatcgccggtaggtattttttatccactttggaccggtactctttgagcatggccgcaaatacttccttatcaatagacagattcaggttatcgtatttctccagtaacttcttcatacgggtaacgaccaacttctcttcggcctcaaaatcgaaattcagtatttcgagtgccaattgaaccaattcgggaccattaatgaacgactccccgaaataagcaagggcacggtttgtttccctacgattattataattcagttccagagaagagaacagacgaatcagtttctccctttcttccggatgagactgaatccagtcccggagggctgcttctgctgcgcgcttcttttccagcactttcaggtgccggatggctttattcattcctatgctgtttttccagtagttggaactttcatcgtatttagaagcatacttgatacggatatccggatggcgatccatttcccgcttccaaatagcctgttttaccccgcgcacatcaatcatggcctgattaatgccgttcatcatttcttcgatcccatacgaagagagatagcgctccgtactgcctggatatccgagagtcatacagaaagagccttctttatatccatccaatgaaataggagctacgtattccggatgataagggacgttctcaggtgaataatccgccggtccgttctgtttgttggcataaatacggaaaacgctgaagtcacctgtatggcgaggccacatccagttgtccgtgtcccacccgaacttgccgactgaagaaggaggagcaaaaaccaaccggacatcattaaaatcacggtagacagaaagccagaactcgtttccggcgtaatacgcatcgacaattcccgtcagcgtagagtccttctctgatacctccatgccgattacattcatgacagagtcgacaactacgcgacgttcactttccgtatgagcatgtttggcagccgagagcacacgcttggtcacatcctccgtacgaagaaggaaacggacatataattcgggattcggcagttcttcaccaaggttgcgggctacaaaaccatccttcagataatcatgttctacggaagaatgctgctggatactgctgaaaccacagtgatgattggtaaataccagaccatcttcggaaaccaccactcccgaacagaatccaccgaaactgacaacggcatttgccaaagccggtttcttcggattatacagtttatttacaggcatctgcaaaccgagttccttcatcacccgttccgcctgtttgttcttgcgaaggttccccaatagccacattccctcgtcagcaaatgcctgtgacaggcaaagggagaggagaatcattgcggttagtctgagtttcatgctattatttttagatttatatattctatgatcaatccgagggtcattattcggtaatgagcctcaacttcttcgctcccacccgtgctttcagccatgcgctgattttctccttctcggcaactgacggatgtttgccaaatttcaaaacagccagtgtcactgtatccgttttcatcgagtctacccgtgtttccagcgagtgagcgatagaaagcgaagtgatggaaggataaagcaccttcaattcgggcactaaagtacgtcccatcgtatcatactctttatattgagcgaggttttcttccagtcgggttatctttttctgctgttcctgcaggcgttgttcgctgtttttataaaagtcctccattaccatggcacgaatggaagagacatctaccgcctcattattcatcccttgcagtacggtcagctttgtttcttccagcttgtattctttcagtttgctacgggcaatggatatcgaagcatccggaacttcgggaccgatcagaactactcggatgtctttatgctcataactgatcttcttatcaagtacctgcgtattctcaaagttcaactgctcattgataaaccggttggctgccgtctcataaaaagtacttttaatgatgccaaacgtcagataaacagccggacacattgtcagcacaacaatcagaatgatgtatttacgcaccatcttctcgcgtgccttatccacaaattccttacgctggaagtgcatcacccgcacaccgataaaggtagccagactgataaatacggagttgataaagtaaagataaaaagcacccagaaaatagaccagattgcccgatgccagaccgtaacctgccgtacaaagcggaggcatcaacgccgtagcaatggcaactcccggaatcacatttcccttctctttggtagatagggcgacaactcccgccaaaccaccgaaaagtgcgatgaatacgtcataaatcgtaggcgaagtacgcgccaacagctccgattgtgcttcggcaataggagtgaaaaggaaaaagatggttgccgtcgtcacactgaaagcagtcgtgatgaggaagctcttcaaagaacgtttcatcagctcgaaatcattcaaaccgacagaaagtccgacacccatgataggacccatcaacggtgaaatcaacatggcaccgataatcactgccgtagagttgacattcaatcccagtgatgccataaagatggcaaaaataagaatccacaaattggctcctttgaattctactccttttcggatagagtcaacggtttccatttcattgtctttatcctttttcaagtccaggtattcacccaggaacgacttgatcgcaaacttattccgttcatctgtcttcatagtcatttcttttttataatccggttaataacaggaatctgactcaaaggcaggtcccgtttgataatataagcaataaatagtagcagaagtactgtgcggaatgcaagaagcaaaactgtattatgaatcggcatccattcaccaatcagatacagaataatagctaagcctacataacaacctattccacgcaaatcataagcaataggatatttcttctgaccgacaaaataagaaagcaacatagctatggcatatccggtaaaacccgcccatgcgcaagctacatacccatatacaggaatcaggaagatattcatcagaacaacagtcagacaggctataatggagaaatatgccccccatctagtatcatccgtcagtttataccaaaacgagagattaaaataaatccccataaacatctctgcaatcatcacgatgggaactaccttgagtccctcccaatagtcttctgctatgatataacgtaaaatatccagataaaacatgactgccaggaatgccagcagcgtaaagatgatgaagaacttcattgcctgcgcatagattcgtttattatccttatccttacttttgccaaagacaaaaggctcgtatgcaaagcggaaagcctgcgtgatcattgccattatcatggctattttagtagctgcactgtaaatacccaactgtacatccgcttccaccttatcggggtagacaaaaggaaaaataatcttgtctccaacctgattcacaatgcctgccactcctaatatcagaatagggaatgaataatataacatccgcttcatcagcaaacggtcaggacaatagcggaattcacggaattcaggtatcagcccgagcattacaacaaaagaacagatcagattaataagaaaggctacccctacgtcatcgcctttcatgacaacaaaataaaggatattcagcaagatactgactaatataaataagagtttcagtccggcaaacttaataggacgtttcttataacgaagataagcaaacggaatagcctgaatggcatccatagccagtacaatcagcatcatgcccagataccatggatgttcactataccccatcagccctgcaataggattgaggaagaccagacacaacagcaaaaacaggagcgatacgctccctaccatcaataacgaaacagaatataccttcttcgggtcgtcatctcctttattggcaaaacggaaaaagccggtttccattccgaaggttagcactacgagcaataacgccacaatagcatacatcttggtgatcactccatatcctccggaagcagcaggaagtgaaaaagtataaatcggtaccagaaaatagttcagaaacttaccaataatactgctggcaccataaatcgcagtgtcctttgccaatgactttagttctgccatgtttatttagatctctttattatcaatgaataatattatttcttttgtttgaacagccactccatgaaacccggataattaaatgcaggattccagctgccatgattgcaaccggggaattcgatatattccacctttgctccagcagctttcagtgctttgtacgcttcacgcgacccttcaactgttaccacatcatcggcatccccatgaaatatacggaacttcacttctttggcaaccggcaaacggtccggattcaccgatccgcaaatgggaacggcagccgcaaaaatctccggataacggaccaccaaatcatacgtccccatcgctcccatcgacaatccgacaatatatatccgttttttatcgacttcgggcatggccagataagtatccagcaattgtttgagagtccgggtaagagaactcatctcctgtcctgcaggcatatctgccggaaacagtgatttcggacgttccgtataagcccagtagctacctgccggacattgaggaacaagtacgaaagccggatatttctctctgttgacaggattcagaaacatctgtccgccatgcgtcagttgtctttcattgtcatttccacgctcaccggctccatgcaggaacaggaccagcggatatttcttccccgccttcattgactcgggacgaatcacccggtaaggcaaagaatctcctgtggaagagacaaatacgtccttctcataaccttgttgagctgataatgacagactcaaagagagaaatacaagtaagatactccactgcttcatactccaatcattcaataaaatcagttatctgtttaaacattcctcaaaaagcctgcttttaattgtcgccaacactctccataccgacagccgtcagatcaaactatcagtcattaaacaaggttttctgactgctatagaggctccttcccaaatgcttataggcaagctccgtcacttcacgtccacgaggagtccgtttcataaaaccttctttgatcaggaaaggttcatacacttcctcaatagtgcccgcatcttcgcccaaagcggtagcaatggttgtcagaccgacaggaccgcctttaaacttgtctatgatggtgcaaagtatcttgttgtctatctcatccaaaccatacttgtcgatattcaacgcttccagtgcaaactgagctatttccgtatcgatagagccggaacctttcacctgcgcaaaatcgcgtacgcgacgaagcaaagcattggcaatacggggcgtaccacgacttcgggaagcaatctccgatgccgcccgcaccgaacaaggcacgtccagtatggatgctgaacgtcggatgatattactcagaatatcatcgtcatagtactctaaatgcagattaataccaaaacgggcacgaagtggagccgtcagcaatccgctacgggtagttgcaccgaccagcgtaaacggattcaggtcaatctgaatgctacgtgccgaaggtcccttatcaatcatgatatctatccggtaatcttccatggccgaatagagatattcttctaccaccggcgataagcggtgaatttcatcgataaagagcacgtcgttcggttcgaggctggtcaaaactcctgccagatcgcccggtttgtcgagcaccggaccggaagttactttaaagcctactcccaattcgttagctataatattggaaagcgttgttttacccaatccgggaggcccgtgcagcagaacgtggtcgagtgcttcgccacgcagacgtgccgccttcacaaagatgcgaaggttttccaccaccttatcctgcccgctaaagtcttcaaagcttaacggacggagcgcattttcaaaatcccgctcccgtgaagtcagctgatgttcgcgtatgttaaaatcttcttgttccattttcttcttgaaatgtaggagacaaagatagagaaatccattcattttcgatataagaaagaataataaaaacctccgcccactatccatttctcttttccaagaggaataatgaagaataaatctcaaaatcgatgcgatgataagatgccattcagtcttctttcggtgacttcattccctgataacaaggggatcattttcgatattaccaaagcgcaattattctcaaaggcatgagaaaaatttctcaatgcaatgagaaaaaattctcataggcatgagtattttttctcactgtggtgagaattttttctcatcacggtgagaatactctgagaatatagcaacctgcatctggctgtgtataaacacaataacaagtaattgctttccgttttttccctgctatttaatgaccataaaagcctcttcttcctaaaaataccgtatttacacattcttttcttaagcaacgcatcattctattgaagaatagagtgaaaaagtacacaagaccggtttcggtcttctactcttttgcccgaaaacaattagtttatttaaaacgtaataactacttttgcatcatctatatacacgcaatcgactatggttctaaattatatctggatagcattcttcgttatcgccttcattatcgccctaataaaagtaatttttctgggtgatacggagatatttacagctatcatgaactcaactttcgactcttcgaaaaccgctttcgagatatctctgggactgaccggagtactggccctctggctcggtatcatgaaaatcggagagaacagcggactgatcaatgcactcgcccgctttctgagtccggtactctgccgcctgtttccggacattcccaaagggcatccggtattgggttccatctttatgaatatgtccgccaacatgctcggactcgacaatgctgccaccccattgggactcaaagcgatgaaagaactgcaagaactgaatccgaagaaagatacggcttccaatccgatgatcatgtttctggttatcaatacttccggcctcatcatcatcccgatcagtatcatggtataccgtgcgcaaatgggggctacccaacctacggatgtgtttatccctatcctgctgagtacttttatctcgactctggtcggcgtcatagccgtcagtatcgcccagaagatcaatctgatcaataagcctatcctgatattgatgggcgttatctgccttttcttctccggattgatttatctgtttctgaatatttcgcgtgaggaaatgggtacttactctacgctgatagcaaatattcttctgttcggggtgatcattctgtttattctgacaggcgtccggaagaagattaacgtatatgattcttttgtagaaggtgccaaagaaggcttcacgacagccgtacgaatcattccatatctggttgccttccttgtaggcattgccgtattccgtacttcgggagcgatggatttccttgtgggaggcattggttatgtagtcgatctgtgcggagtggataccagttttgtgggagcattgccgacagcgctgatgaagtctctcagcggtagcggtgccaatgggctgatgattgacacgatgaaagagatgggaccggattcgtttgtaggccgaatgagttgcgtagtacgcggagcttcggacaccactttctatatccttgccgtttacttcggcagcgtcggaatcagtaaaacccggaatgcagtcacctgcggcttgattgcagacttctccggtattatagccgccatcttaatcagttatttatttttcttttaaatcatagactcaattatggctgtaacttatcaaaccgaaggcgtcaagatgcctgatatcaaaaaacgggaaacaacagaatggataaagaatgtagctgcctcttatggaaaaagactcggtgaaatcgcttatatcttctgctccgatgaaaagattctggaggtaaaccgacaatatctgcaacacgattattacacggatatcattactttcgattattgcgaaggtgatcgtctgtcgggcgacctgtttatcagcctggatacgatacgcaccaatgccgagcaattcggggcagcttatgatgatgaactacaccgggttattattcatggtattcttcatctctgcggtatcaatgacaaaggtcccggggaaagggaaatcatggaagaggcggagaataaggcgttggcaatgcgatagttggcgatgcaataaaaagccattgaccggataaaatgagcaccccgccacaatcactgcgacgaggtgcccccaagtatctaagagagatagttattgttccgttaacgcttgctttattttaaagacaagactttgataatgtgcccgggtagtagcatcacccgtatttactttgcttcgcagcaaactatagctatccattaccttctgataaatagccggattcttaaccatatccacacttccgagcgggttgagttcaaagccggctttcgtccaatcgacattatccgtaagcagttgtttctcaacttcattcaagtctttaaatgagaatggagaagatttttgtttcagcattcctccttctttcaacaacttttccacataagtaatttgcaggttacggtcgtacatattcaaccgggcaccggatatagttttcttccacacaaaatcataaatatcatccatatactcagcaaaagtataagcctgtttgggatataactcctcatacaaaacaagactggatgtaatgtatgtgaagaacaaacgattcataatgattgactgcaaagtacttggcgaataagtcggaccggtatactcaatcaccctcttgtcaagtacccattcgggtagttccatcatagtttccataataaacttcaatgcctccttctgttcagctttcggcacaaaacggataacaggcttttcgctgtcccgtctcggctcatcaaaataaattccaccgatggacaccatggcatgcagtaagtagcgttgcatctgcataatcacttcctgatatgattccgtcaagcgttcatattgatgatcatcttcataggtccattccggcaggtttttcatgataagtttcagattctttaagccatatcttcctgccttcacggcattatcacccaaatcctcagatttacaagaaggatcgacctcattaataaaaggctgcggaccgtatttgtacatcggatcattctctttctctttgatccacttgttcaaagtagctttctcatcttcaggagatgccgcatcaaatataggtttatatccccatttgatggcaaacttatcatatacacccaaaagcggaggagtcagagcaactcctttgtcttccggctgagctacataattatagcgcgtatagtccatgatggacggagtggtaccatacttctgagtgaaagtggccgaacggagcgagtctaccggatacgaataagatgcaccgaagttatgcatcagtcccagggtatgtccgatctcatgcgctgctacataacgtaacgagcttcccatcgtctcgtcatcaaacacagccttgcgcactttggggtcaacagtagcagtctgaacaaaccgccagttatgtaacaacttaatgatatttgaataaaacaagacgtcaccctgaatgatttcacccgaacgaggatcggcacaggaaggtcccattgaattttgtatcggagtggtaatcattcggtagcagctataacgaatatcatccggatcaaagttcggatcatccttcggatagtctttcgctacaatcgcattcttaaatccaatttcctcaaacgcaacctgccagtcttctattcctttctttatgtaatctctccacttgtcggggatagcagtatcaacgtaatatacaatcggcttctgaggttccaccaattcaccttgcttataacgttccaagtcttctggttttggttgcaaatcccatcggttgatgtaagtcagttcttgcaaaccatctttcttttcagtataaaaccgcttgctttcatcaaaataaccgatacgcgagtctccataacgaggacgcataatttcctccggcagcaaaataatattacgcgtcatggttacagtgaacggtcctccgtcaacagtataactcatcagcgtcttgatgtttatattcagcggaaaacacttcattcccagaatagtcgatttggaagaagcaagacttcccttcagtgcttttctcttcatcaatacatccattatattttccgaacgaaacgggctgaattcgggtacatccgttatgaaaagcgaactcatatcgatgacatatgctgaagagtccggtgaaagactttctatcttatatgcttcccaaatagggtctgagaagttgcgctgaaaagcagcatacatattggaagtggtgtcacacaaattgcgcaccatctttttgtgcatgtagattttctttttatctgccgagaaagttaccagtaccggattgcgtggcatttgtccggcagctatatctttattgttactggtactcgatactctggacgcaatcataaaatcgcgtcccatcaagtctttaggtatttcgaaataatacttatccttaacgatgtgtaccttaaacatgccatcaatcgtcttggctcctttcagtagttttttgtattcggtcatactactctttgtggaatcttttgccgccggctgctctgtttccgcttttgctttcttctttttctttttaaaaatctgactttcggcattagcagttaccgctccggcagttaatgctcctacaagtaataaggtgaaaattttgttcatatcatgttgtttttaagttctatagttccagtttggacagatcgaatccgttttcaagcatagcttcccgaatcacatcatacttcttcttcattaccggatatttatcgcagatttcctgaatctcggcaggagttttctcaaagacgaaattcatccattgcgcaaggtcttcactctttaaaggagcataaatggaattaaaatccggccaatcttcatcaatataggagttctcagaataagtaatcaccccatacttataaaaatcgatttcattagggtccgttcctttaaaacgataccagttcgggtcgtacaatttcggttcaacttcttcactagcttcataaaaagcatctgaaatagtaaacaatcctctgacttccgacatatactttgcccaaaagctggcattcacatctgctctgattttcacaaactcctcatcggtcattgttttcagagaagatgatacattacctaaggctataaagctgctactagcatagcaattcatgatggttgtctcaccataagaggccatccggacctcttcagataacaatatagaaaaaggtaaattcttctttaaaaaactatccgagtacaaattcaataataccttttgcaaaaactcaatcccttcatcaataatctcctgcttttgttcgggagcagttattttaattccgttattcgctgtaaagttgaatttataatcagcctcagtcggattggttataatcacagtctgatatttctgataaaactggtatataaaatgctgtgtcggatctgacaggtcatctgtcaaaatgttatatttatccggttgctcaggaacgattaacgcatcttcatgataacaagaagacatacctgccaacatacaaattaataatataagtttcttcataatcgatcaattattaacaggttcactattcggacggtcgaatatttctatttccgtatttctctctctttcgctcttaggaatcggcaacacgtatgagcctttctctttcagttcgaagacatctcctgctccctcgttctcctttgaactgtaagtatgcgtaagaggagggcagccatatctgcgcaaatcaaaccagcggaatccttcaaacgccagttctctacgacgttccttacgtacggttgctacaattccgtcttcatcaacagctaatggcggagttcccggtttcatacgatttgcacggagctcatttaagtcagcaagagccttgttcgtattgccaagttcagcaaaagcctcagcacgattcagataagcttccgaaatacgcaaggcgttggcatagactgtagcagaatttttagtccacttaataggtgtatagacactatactgtttgttagtaggtctggtctggttgccgattgtattcttgaaataattcgtaagacgcaaatcatcttccgaatatagcgctagcaaatcatcagaaaccaccaagttccccgtatacctgaaatcttctttcatatgcgtctcaagtgatgtaagtccgtaggataacaagatttctttgttagcaagagaaaagaaatagtggtcctttttttcctgaagtttgtaaagtggctgagtcgcgaccttaaagaccgagtcacaataaagaatggtctcatcatatttctcctgaaaaagggcaatacgtgatgccaatagataagcactcggcaagttaggacggaaaatagttttctcgcctcctatagccttaaaacactggatagccttattaatgtcttcttccatttgggcataaacagctgcattcgtggcccgcttcatcatcttatctgataagccgatttctttattgagcggtacacataagtcttcatttgccgtagcaggatgataaggctttccatacaaattagcaagcataaaatacgagaaagcccgcataaaataagcttcacctgctaaatcctgacgctccatatccgtcccgttcatggtataaagctggtccagtatgatattagtcatcaatatcttatgataatagactgtccatgcaacatccggcgttagttcatttgaaattcccacttccgggtttccctgccacgtataatatgcccaaacatattctctgaaatcattagaaatgacttgtggtctggttccatagtaacattggtctttcacatcgtctgtcatatattccagataaggatgaggtatgtctttttcattcgttttcattacctcaccgaagaacagttccttgtaatccttcaccgatctgggtatcatcaaatcttgtgaactttcttccaaaaagtcactgcacgacgataatgtgcagataagcaatatgatatataaattatactttttcatcatcattcattattaaagagtaatattaaagcgaagtgagtaagaacgctgcggtggtacacttcttgaaccaaatccaatctgttcggggtctctgcccttcagcgctttatctttaatgacaaatacattacccatatcaaaactgacacttgctcctttcagatagacaggtttcaaccattcacgtttaaaatcatagcgaatagacatcgaacggcatctgaggaaactgcctgaaactacacggatatcactcttattatacatatcccatccattatccgcaatacgataggtcacatccttatcgttgatctgcaaactcttatccgataaaaccggtataatggttctgtcttcatcacccggctctctccaacgattcacaaattcactggacatattctggtccggataaggaagccgctgtccggaggactcatacaaatcgttcaagcgcattttattaccaaagctgaatgagaataacgcattaaatgtaatattcttatatttcaaataagtagagaatccaccggtcagatcgggttcacgttttccggaaagaacaaaagcacggtcatacatctcctgcaaagaatgaaccacagcatttccttcttcatctttctcattaatatccttaaatgtaggaaaaccctgatcatccagtttatcaaatttataagaatagaaactatttatcgcattgccattgctcactaatgttcctgcgatatagtcttgccaagtgatcgctgagttcccggcattcaacactttattgtagtttttacctgtattgaatgataaactccacatccagtcccgggtctgaatcggaacaaaagaaacagccaaatcccaacctttattctcaacatcaccatcattaatggagacacttgacgcacctgtagaaggagctacgtttttcgtaaccacctgatctactccctttttataatatacatcaagcgatccatagattctgttattccagaatgcccagtcgattgcaatattatacgaattggttttttcccacttcagtttattattcggcagcttatacaatgttgaaatatactcctgtggcattgattccaatgtccccaaactagcaatcaagttaggggtctgatccggatgcacgttaccttgtataccgtatgaggcacgaattgccagatcattcaggaaatcgacgtttttcataaacttctcattgatgacattccatcgtgtagacactgaccatatcggcagaaaacgaacgctcttgctctggccgaacttattagaaccgtcagtacgtatattgaagttcagaatatagcgactgtcataaacataagcagccgtagcatataatgaaatcacattattctttgtatcggtcaccacatccggatgactctttaccaaagcaccgtatcttttccagactgtcgggtcaatatcaacaaactttttacctctttcgggcaaataaccatattgtgtagagcttaatccgtcatattttgaagatctgacttcttgtccgatgcttccggaaacttcatgttttccgaaactttgcatcaatgacaggctatttctccatgtataagaagtattacgtgtattggtcgtcatcaactctcctccaaacggaagcagacaatatctttctgcaaattcggaatcttcaatgggattcggcaacatcttcccatagggactttgtcgcatagaagaaatataatatgattgttcatcaccccagttttcttgtgtcacgttgcttctggacagtcctaatatggatgaaaacctcatccatgaagcaaccttccaatccagattgacagctacatctatagcggaattatcattcttgtttcctgtatgattcagttcgttcatgatattgtaagacaatactccgttacgtccagcctcattcgcatagaaatacaactcattagaagctgtccgaagtggaatagcccgtgaagtattataagcatactcatacacatcaatggaagtatgaggatgttcagctttggaaagcgaaccgctaacctttaatcccaaatgtatattccggttaattctggtatttattttagccagtacgttatagcgctctaacccttcccctatcgtcacactgttattattcgcatatcccatggacatataataattactccggtcatttccacctgtaatggataccgaatgctgatgtgtaaatgctgtacggaacagcaagtcataccagtcggtatttaatcctttcagggtcttcacctggtttaagaattcctgataagtaatatccttattccacagatgttgcaatgccccttcatagccaatatccgaaggtttgtaacttccgaaagataatcctctctcctgcatttcgatagacatatcaattctgtcggcagaattcatccgaaacattttatcgtaagtaggaggagctgttatccccaatgtagcggtatacgagatactcggtttctggctttttccttgcttggtagtgaccacaataactccattggccgctttgataccatagatagcagtagcactggcatctttcagaatatccacacgttcaatatcttccggattgaccgaaccgatggcatttccgatcagatttatcttatccggactgttcagctcctctgtagagatattgacaggttcttccagaataatcccatcgactacccataccggttctctatttcctgtaatagaggaagatcccctgattctaatcttaggagcagctcccggagtagatgacatattcatcacggcaacacccggcaggcgtccctgcaacattttgtcaatagacagatactccccaccaatcagatcagctccctttatagaggatatggagcttgccaacttgcgtctgtcaatctcctgataacctgttactacaacttcatcgattgactttacatccgatttcatcacgattgtcatgggtttagtactggcaacttttacttcctgtacaatcatacccaaatacgagacaatcaggacaggctctttctgatggaacaaattaatagaaaacttaccttcattatcagttatcgtcgaatgctccgttttagagagttttatataagctcccggcaagggcaaccctccctcatcaaccacaacgcccgtagccgtgcggacattctctttaggttgctgatatacaatggttacaatatttccttctatctcataactgtatccggtatttgccagcactttgttcaacacctcactgataggctgactattgctctgaatagtgatacgaggcatattcttcacttgctccgtactataaataaagttcaggccagtctgtacttttacagcatcaaaaaattctttaactgttgcagatttaagatctaaggataccctcattgcattagattgcgatgcagccaacaccggtgtaaacaacaaggaaataatacagagaaacatgataatgcgttctcgagctctctttttttgcatgtcgtcctccttttttaatagtagttaatatgtttatttctttataattatggtcttcccctgtatttccatttccagatgagtcacccgctgtatcgctttcaatatgggctctattgagccgtagcgatcaatatctcctgtaaaacgtatcttcttggtatcttccgattcgaatacgacatctttgttgtaccaacgtgatattacattcatcagactctccaaagaacagttatcaaaaacaaaacgtccactgttccatgcgatatacggctcgatatccactacgctaatttgtacatcttgcgtatcagcctgaagaaccgccaattcccccggttttattttatattcccctccctgattaggaagcacacttacagaacctttcaccagcactactttcgttattccaggcacatgtgtatttacattgaaagttgtcccgtactgcttgaccactccattcgccgtaatgacacggaaaggacgcttgctatccttggctacctgaaaataggcctccccatccaaatagaccgtgcgagtggtagtaccaaaatgtggtggatattttaatgtcgtattataattcagatgcactctggtcccgtcttcaaacgtcatccaaaattcactgtcatcataagtactcaacttattattttctacaacagagacctcttccgattcgttcacatcagtctcagggacagacggctgagcaacaggcacttgttccaccgaatcctgtaaaggcttagcaggcactgattttaaatccatcttctgtccatttgccagaaccagtgttgccttttgtttacccatcttctccgaccggatcatagcaatacgaacttcatccgaaatcaccggctgagaatccatcagccgcaaagtccaaaaccatattgcaaaaccaattatcggcaataagaagatagccgcataccgtcctattttgatccaacgagcagagcgaatagagaaatgctttttctgaaatctttcccaagcacgtgcttcatctacctgggcaaactgtttatacctgtcaatcaaacaagcctcacgcatcagacgatcatagttctctctattttcttgagaactatcaagccatgactgcaactgttttttatcttcttccgaagcgtatcccagcaactgatcatggataatagaatttatacttcttttacgctttatcatattatttcaggttatttataataaagacgactaagaagaaaaaatgggggacaggattctgaagtttttttattcaaaagatactttatttatttagaagaccgttctttttgtacaataatcaagaaaaacaacgaacattttgttcattgcaaacaggtgttaacaagtaaagcggattgagtgttatgcttctttttagggaagtaacatttgtaataatagaaaatgataggagcctaatttttttctaaggaaggacattgctctcttcttttgagtcttcacagtttcaagagaaacatggagtgcagtggcaatctcctcgttcttcttgccttccatatacatcaaaaaaacttccctgcaccgatccggcagcgcatcaattgtctgaagaagctggcgatagacttcttcactaaagaagccctcttcctcctcttccatcctaaatgtagtggaatgactatcaagcatcttctgaagatagttgccttccacatccttatgtttcaaataatccaaggaagcatttctgacagagttatacagataaaccctgaatgaagccagagaccggaaaaacatctttttctcccaaatagtggagaataactcctggacaatatcttctgcagattctgaatctccgacaattgttattgcatagcaaaccaatgctttataataattcttataaagcagtcggaaagcagccgcatccaacttattaatttgttctatggaaatctcattgttagtcatttcgggagttttgcgccaaaaatacaaattaaataataatgttctatacagaaagactgatatttttctctcgggcaatctagttgtatggtactttccaaaagatatccgcctataaaagattcacccggatttacattcgacaatgtaaacccgggtgaaaaatgctcaatattgcatagaagaaatctttaaaaatatctcttacaatattgttttcatagagacaaattaattaagagagagtttatgtaatagagatttattcaatttccgtagctttattaatgcggtagatcaacaggtcataatgagaacgatctgcctcaggcgccgtcgaaattgctttcttgagcatgtctttcgtacgcatcaacaagtcaaaatagtaagcagctatttttgtctggttggtatagatcggtggaattgaagagaagcctgctacttcttctgcattttgcaatgaatacatcttcatatccacctttccgccatttctcaaagcagccagattgatctccggtttgccggtagccgcaaatcctgtttttgaggctttgaaactaccaataggcgcagttgctgtcgatgttgaaataatactttccagaaacgctgtctgtagtgctctctcgaaattctccaacggacgatgcttcaagacaccttcccaaacaattccatagatatcatccagatattccgaagcagtatatgctgcatccgggaagcgttctgtacaaacctcgacataaggcagacgtccgaaaataccattaaagatatccaaacgtaaacggtcagccttcttatctgaaatttcaaattcattcaaatgagcggtatcgtccacccaatccagattctttgccagttccaatgctttactcaaagctgctttctgtttctcacgatctaccattgagtaacttggtatcgcatccttctcgcgaatatcattcaagtaaataccgccaatataactcagtattgcataaatacgcccgctcagtctttcactaagggcagagtgtacacgtctgcgcattaaaaaatcacggtcttccttggcaaaccaactataatagttctcaaatcctttgcgaacattaggaagcatatagtcgaatgatttcaaatggtcatctcccagacttccgcgactattacgaggatcagaatcaaaacgtgactgattacgtatataagcataatatgggtctcccgtatgttcacgaatccagctatccaacgtctctttttcttcctgtaatgaagaagcatagataggctgatataaatatttaatcaccagttcgtcatatggaccaggctttgtattaaccaaacacactccattacgaacatcctcctccgtagctacgtcattaatgattacgcctcccataacagaagaagcgagaccatacttttgagtaaagcttgccgaacgcaacgaatccaccggataagcacaggaagctccccagttcattgtaagtcccaatccggttcctacagcctgagcaatagcagcctgaatcaactcaccctgtatctcctgcgggaaaacagtagtacgcacacgaggatcaatagcaacagtggcccctatacggtcagcatactgaacactgatcatatttgcattaatcagaatagacgcgttcaatatttcaccggtacgtgtatctgagtgtatcgttgtctgtgccgaattcagccaagaagccgaataacgtattgtcatacagtcaaagctgtttgcattgaacaatgtgtcattcttcgggaattctttcacacaaataacatctttaaagccgatcttctcaaatgccttattccatgattccgcaccagccttgatatacggattccatttgacaggcatcagactgtcgatatagaacaccagttgtttgactggccgaaccagctcgccacggcgataggcagcagagtcggaaggctcgatacgccaacgttttgcatagcgtatactcttcacttcctgagttgcccctgaataatcacttttcaattgtgtagtcaatcccaaacgtgagtcagccaggcgaggagtcatcggctcctcgggcagaatacaaagcattttagtgacgaccgctgtcaacggtacgtctttgtacatattgtatgctcccatcagcgtatggtcgacagtatatgacaactcttcacgtacacttatatgattttctgaagccgatacacccaaaatagcagatttatccgattgcagagaatgatcgcgcgacacgaatccatagtatccgttagccgatgtcgaagggaaaggtttggtaaaagcagatccctccaaaaataatcccttcatatctaccacaagtgcagaactatccggagtgcaagccaataccttaaagcttttgaaaatacccggattatgcgcattgtccaacgcacgtgcgatataagcatcaccactggtatttaccggcttactcaataaaggcatacgtgccacaagagttgaatcgatcatctcaaaacggaaacgtacgtcggtaccccctaactgtccgggagctccttcaccaccgtcactcgtattttcaatagaagaagcaaacagcatctcacggcctaacatggcaaccgggaactccacatacactttcccttccaccttatgaatagtcatcagcccgtgtgctatctgaactttcttattcttgaacagcttctgatatggtgtcagattttccttcttatcttcttttttcttctttttaaaaggccagaaagcatttccttcctgtggcaggcaacatgcaaaaagaagcaataaacaaagtatcttactatatctatttctcatacttcctatcattttaatgcctggtcaattttgtacaacaataagcggtagtggcgttgtgtatcagccgaaccggtagaagcacttgctgcaaccagactacgaaccttcttcaactcaccgtagtatatatgttccatcggttcgatcggtgctttcagatctacatcatcatcaaatccactgatttcctccaaacgggcagcctgcatctcacgaggcttgttattaaaacatcccataaattcctccgagatgattccgaaacgttcgcgcgaagcagctttcagccattcgggcacttcaatgtgagcatacatatctgcgatacctttacgggtagcattctttgcaacccctgcaaccgaaccttcaatcagcttcgtcagataattcatctgcaaacgcatttctgtttctgtcaaggttcttccggcgcgggtaggagcccatacaaaacgttctatatcggcaagatattctttctgagtataaggagctgatgtcgccttacccgaacagatagccaccgcaccacaacgagacaagataccatcaataattgcatcttccatctgcatggccacagaagtacggatagggaattctttcagtgtttcgcgtgcatccagccacgaaaggtccttcagttcattcaataagaaattcaaagcctttttttgttgttgcttcgatacagttttaaagcttgggcgctgatcaccgtcatagcgttcgttcagataaataccaccgatatctcccaaaacgaaagtcaaataacgtacgtaagcatatacaatttcgtcataaacaaccgtgcggaactcaaaatccttatccttatccgctacccaatcattgatatgctttagcagatattgcaagttgcgacgtccatattcagaagctttcaccgggtcatctcccaagtcttcctctactgaacttgggtcaaaacgacgtctgaattgttgtttaccatagcgatatttaacatctccagacttctcactgatccatttatccaaaataggaatttcttcctctgccgttttagcctcaaaaatcggggtgtacagccaggcaatagcatagtaatcatacgctcccagttccggaggagtcaaacgcacgcctctctctttatcacccggttgagcaatataattgttacgggcatagtccataatagagtaggtcgtaccaaactcctgagtaaacttcggatcacgcaaagattccacagggatagaagaagaacctgccatattgtgcatcaatgacaatgtatgtcctacctcatgcgagagcacataagcgatacaatctcccagcaagtcttcacgcaaaacaacatcacgtacttcctcatcagcaggggcagtctgcaagaagcgccagtactgaaccaactgcacaatattgtggaataccgtaacagatgcattaatgatttctccggaacgcggatctatccaagaaggtcccatcgcattggccaccgtagacggagcataacgtatacaggaatatttgatattctccggatcgaagttcggatcatctttcgggaaatcttttgcaatgatggcattcttaaaaccgatcttctcaaacgctttctgccatacttcaactcctttatggatatatttattccaactcaacggaaaagtatcatcaatgtagaaaacaataggtttctttggttctaccagttcgccacggagataggctgccgaatccgatggttccagattccatctgtgagcaatgtgacgagtacgcaacccacgaccttcggaagcaaattctactacagagtgttcaaaaataccaatacgtggatcagcataacggggacgcatcggttgttcaggcaacagaatgaagctacgattcataaccgcagtaaacggcattttcttcactgcataatttcccttcatacccacgctgattttgtaggtcagtaaagaacgtatactcacattatcctcaaagcctttgactccctgaataaatgagctttccttctcaaaatccttactaatatcggctcccatcatctccatcattgaatatggtgagaacggagaaaggttctttttatcgctcagcagatagtctgtcatatcgaataccactgccgtgctatcgttattatatgctttaatctcgaatgtttcagcgattgccggcatggtactgcttaccaagcgcttcttgatttcacgatcttcagagaactgccctgcctgtacacgacgcaatgtaatagttgagtcgcgttgcacaaaacgaatcagaaaaggatcacctgacttctctcctacacagccgaactggttatcggtcgtttccacgatggtagaaccaagtagaatatcccgattcatcaccttaatcggcaactcaaagtagattttattatccaacttgtgaagagtaatgaaacctttagccgtggtgactttcttgtctttaaacagtttgtcgtacttggtttccttcttctctttctttgtagttgcttcagtagaagctttcttcttgtttttcttcttagccacagcggggctgatcatcgccccacatagtgcaaccagaagaagtaaatacagttttttcaaggttttatcgtttttaagttttaactaaatgactcattccaagattctttccatttataacggacctgaataatctttccaaaatctttctcatggaataatacaaatttattttcagcatcagtcacttgaattactttattttgttggattacatatttcttaagagtataatccgaattatcatcttctcctttcagaataaacacatcaccactctctaaacctactataatgtatttattattaaaacattcagcatcaatagaagcaataggagaatcgaactgagcacatgtatacaacttatttccatccgtatagtaaaaataaagagtctctcctttacttatgaacaagtaaggcgctttatcttgattacgacacagataaaagcagttcttggaagtgccgtcaatcactgcatcaagtcctttaatctcactttgagatataaaactagcacccactttagttacagaactacctcctccataagcttctactttaaacttctgcatataaaacttgccagctttatctttaatgatagacatataagaaatatctccccaatccactaggctagcacccacaaaatataccgaataatccttcatattatccagtctggcatcagaaggtccgtactcatattcttccactttcaacggtaatacctttcctgaataattataaccttgccaatttttataatctgcaatatgtagatactgcgctgaattcttatcataaagtaccatacctccatgttcatcgaatggagcatacgcaatcatgctaccatccacttttatctttccttctttatctgacgtcaacgggcgatcaagaaaattactggagttaaacagtaagttactatcctttacacgtgtatagatagttccatcttcaccaattgccattgtaaggaattgcatatcaataactcccaccgaaacaaatccttccggatatgacttactaagaaacatttgagataatataccttcttgtttataactgctacccgatatgtcaattgctccctgaccacctttctgtgctacccacagccaactcgttttatcttctccatcccaacgctctgtccagtgcggatacatagaaacaggctgagtacccatcgggacaccattaatcattgaatagatgtcacgtgtaacaacaggtttaagtataccctcttcagtctgttctctcaaaaaagacagagtactatttccttctttctcagatagtacaacccatccattagaagcataagcagaagaaacagaaatgtaagtagacccaaaataagtaacccccgtattgttatccaatactgccaatctcagttctttagtgctcgcaatagtatctgctatccattccaaatctttggtatctccaatgacatgtccatcaaaagtccactcatacgataaatctgaattctcttttcctaaggtaaaaactaattcaggtttcgatatcactttatctcctaacgcataaaaagaactttcagtctctacagagatttcaatatcgttcatttccctataatcataatttcctttatcctcatagcaagaggtgatggctaaaagggacattacagttaataatatctttattttcatatttcagtctctattctaattagttaataggtacagtcatcgggaattcgtcaccggttgtatcatttttatccattatttcgttctcagcaatatagtacttgaacatcagtgcatattggcgtttctcagcagtacttaactttccaaagtctacgacattagtacatcttacaaactcttcatatttctttctggaatatgtacctaaatacaacttagtgacatcattcgtccaccacaaaggtttactgatgatattgttgaatataattttgatttgttcgtactccggtatagatcccttaaaatactcattcggaaggagtttcaagcataactttacattctcttttaaatcttccgtctttatcaatgtaacttctagtgtatcgctggataaaccagccttaaacattggactatcgagcaaacgataattcttctgatcagcattctttatcttatccttactctcatcctccgttactacacctaccttgtaaggagtattttccgcaaacggttttcctatcagactcaaaccgatcttgactgtaatttggtcactggtaggatagttgttgaacgatacttcaatattctcttcctcactatctttcaattggctaaaatatagatactgttcaccgatataaggcttaatttcatcttccgagcatccccaaaagcaaagagatattaaagctaataaaatattttttttcatctttctttttcgttgattatcatacattaaatatcttcattatccggcttatcaaatacaaaaatcgcattatctaccggttttttatccaatcgcttatattggaaaaataattgtccttctcctataaactctttacgcatatctttcaataactctatatgaaatccttccaatgaaccaatgctcttttctagattggtagtcaaaatacctcttgcataacgtacttcatccaacatcttaccagcttgggaatattcgcttttacgagcaaaatactcgcccataatgtaatacatctcactcaagcgtatccccggaatcatatccgaaccatcttgtcccaacttaatatcgtatttcaaagaatatacattggatgtgaaagcccccgtttgcaaagagaaacgtttatcctcttttttctcctcttcacttgcaaaaatattatcactatcgagaataaacatcgtttgatttccttttgtaatataaggaatatagtcttcttgcaatgttttattaaagaaacacataataatgctattatagtccttcaaattcgtatccaagcttgagtaactaacaaaattgaaacagggttctgaagtatttccattcggataagtagcttccactacctctttcgcctctttgtaagctagctcatactctcctccccaataatatacacgcgccagaatagcagctacggcatagtaattcatacgatatcctctataagcaaagaatatatcactggatgctatatcattagaaagtatactagacgccagcatacgataacccgtactcatccagattttatgttcatcagttatatcacatttagataatagttctttcgcagcttttagatccctgattgccttcgaaagaatctctttgctgccctcataggaaggtacaagggtaggatacacctctacataaggaatataagacttgccatcatccttagagatagcaggagcaaacaagcgaagcagatcaaaatgcatgaaagcgcgcaatgccagtgcttctccccaaatcatgtttttttcaaattccccctctttaaaaacggaaggacttgcttcactaacattgagaatcaagttattacaattagcaatattattataactgacagaccatatattggaaatgaatgtttttacatccgagtcctcaaactgaaactttgcagacttatagtaagccgaagtctttggtataaaattactgccattatctgttttataatattgtgcaattgcatccataaatccccatgacatagtttgcccatacatggaggaagttcccagattcagatatattccgttcagagcattacgatatccatctcctatttcgaaaagcttgtctccattcacttggttactcggtgatacgtccagccaatcactacaacttgcagtacacagacttattaccaacagtaacatggtatataatttcttcatattattcgtctactttaaactattaaaaactcatctttactgaagccgcaaaagaacgtgaatacggataatccaaaccacgttcggcacgtacagtagcagcacggaacaaatcattccccgaaagttctacacgcaacagaccgatatgcgctttcttcacccatgcagcatcgaaatcgtatcctaaagtaagagagttgaatgtcaacacattataatcctgaacaaaacgactggtaggacgagtcaccgcaaccacaccatttgtctgcaagcgtccgtaaggagtacaatctcctgggttttgccaacgtcccgttaacactcgacggtctacattgctactttgaatatgcgcattctctactttactgaccaaagtagaattataacgctgtccaccaaattcatacataaaagtagaatagagagagaattgcttccaacgtagattaaacccaaaagtaccctgaagtttaggttcttcgtttccaattaccacctgatcggctgcattccaatcatacgttatcgtaccgtccggacgaagataaatctccttaccgtctgcaggattgatacctaatgagcgtacaccaaaaatagatgtcaacgaaccaccctctacatactgcaagtaagtttcactgtacttagaatcacctttttctgaattatatttagtatatttttcttgtacacgcttattgtattctttcaggctatccgatatttttgtaatctcgtttgtattatgagccatatttgcaaaagctgcaacaaaccaatcttttgtattcaagatagtacttctcaactgaatctcaacccctttattcatcacctcaccgatattatctttataagaagtaaaacctgtagagctaggcaacgtgacattgtttaccaagtccactgttttcttacgataataagagaaattcatttgaaataatcctttgaacatatcaacgtccaatcccaaatccatattatgagttttctcccaacccaatgcactgtttcctaatgccattagtgatgcgcccagacctgttttgaaccaattgtctgtaactattttataaattgtctgtgcctcatagggtgaaaagtctaccttaccggtaataccgtaagttccacggattttaaggcgatccatccattcaaactgcttcataaacttataattgtgcaagtttaaaccaagaccaccagaaaagaaaggtgcaaaacgttgatcagcaccaaactccgaatttccgtcgaaacgtaccgaaacgtctgccaaataaatattatcaaatgaatagttgaaagttcctaatgcaccgaaaaggcgacttttactatctgagttagaaggcaatccggatactttattggcgtaacccggggatgacaattcgccagaaggaaaccctttataagtgataccaaaactatcacccgtacttgaagtcgcattcacaccaaccaagaaattcaggttatgtttctttatattccgattataagataaagtggcagtagcatcccaactcaaactattaacagtagctacatccaatcttcctgaaactacattagttaagcctaacaactcatcattcttttttgaacgcggatcaagaaaggtacgcgcatccgaatttgacttcgtaacactgaattgtccttttagtaaccagtaactatcgatattccacagtagttctgtattattaattaattcccatgacttattacggtcatagttttttaatgttgcttcatacaaaggatttacttcccctgaacctccagtccatgggtaagtcgtctccaagtattttccattctcatccttatattcatcatatggcaactttgaagtatagtcagaaaagcttccataaggagactcctgagaccgggtataagtatatgagaaatagtttcttacctgaaaagctccaaggcgataagacaaagataggccaccagccatacggtcgcgataagaacctttcataacaccttctccactattataagagaaatcggctccccaacgcaaatcatccgtaccgccatccaaatacaaactatgtttgtgattgaatactgtacgaagcggtttggacaaccaataagtatctactccgcgaaccacattgttcaatttttggttataaagtacatccaaacggttttgctcacttgcaccgtcttccggtttagctgtaaacatgccggcagctacttccgtttccaacttttcccgcgcattcatcaaattataatcagtcaagtcgggatattccaacgttccggtaaagttataatcaatattgactttaccctgtttcggagttactgttgtaataataaccacaccattagctgcacgagaaccatacatagccgtagcagcagcatctttcaagatagtaatgctctcaatacggctaggatccatatcatacaacttctgcacactaatctcaaaaccatccatgataaaagtcggaagattaggattgttcttcaatgatgttttagaaaggctttgcgcatccaactgagtagttccaataccggaacgtccacggatatataactccggaacattattcggattcgaacctgctaaattattttcagcaatacgaaaagaagggtcgaacgtttgcaaagctcctaatacatttgttttggaaaccgacatcaactgatctgccgtaaccgtcacagaagtacccgtaaagctatttttactgatctttgcataaccggttaccaccacctcttccaattgctttgaatcgggtttcaacttaaaagtatgcactttatcaagattgagcttgccagtatgtatttccaaagtttgcatgcctacaaaggaaagacgaattgttacatctccttcaggaagtcctaaagaaaaagcaccgtctgcatcagtcattgttccgatatttctttctttccccagtatcagcaccgtcacacccggcagttcgccaccctgttcatccaccactttaccttccaacgtacgtgtcttctgatctttcttcttgatgaccacaataccatctttggtagcataagtgaaacctttaggtgaaagaacgcggtccagcaattccttccaagactcgttggcagcttttacagtcaccggttcaactcctttaaacatctgagagttataaagcatgttgattccagctttctgttttaccgtgtttaaaaatgtttccatcggcacatccttcaaatcaagtgtcactttcttctcatcaggtggaagtgcccatgcactgagaaccatactcaatgcaaaaagacatagcataaagactcttctttttttcataatttttaaatcaaaactcaatattactcattctcatatatcaatatatttcttccgtttattctatagtagatatcgccggttagttctaatgcattcaggaaagtattgatcgtgccatatcgctgcaagtcaccactataagtcaggtcgcgcagagactccttctcataatagacatgaacatcataccagcgctcgaaggttttcatgatatcgcccagccgtttgttgttgaaaacatatacaccttgtgcccagccgatatattcattaacatccaccgcccgcttttcaatgccacgggaagagacgactgcctgttcacccggcgccagcgtaatagtattctgatcgggtgtcgagaaatttactttcccatatacaagagtggtatagcatgcatccgcatcattataagcattaatattaaatgccgtaccaagtaccgttacttctccgaaacgagtccggaccacaaacggatgttcctcatcctttctcacatcaaaataggcttcaccttccagtgtcacaattcgccgctttccgacaaaacggaccggataaagcaatttagaaccggcattcaaatgaacagtggttccatcagcaagaaggacagtattctctcctccccgtggtataaccagttcatttgacttcaccggactttcatcgacgttttcttcttcgtgttgttgtgttgtgacggtcggtcgatatgacagcacccctttattgtatttcacctggacgccgtctactattacatttatatctttcttttgtacatcaatagtgcttccatcgggcaaagtcagcactgcctgtttgctacctggcttgatttgcgcgatacgtgcctgagactcctccactgcctgataatgattcactgcataaaaagaaattcctactcccagtactaccatcgctgcggcagcataccaccatgtccggatacggtggatctttccaccggacgagttctctttttgttgaatttgttgaaggaaatgctcgtaagccttttccgatgaatattctttatacttattaaaagcatcttttaattcctcactatcctgcaatttctcatacacggctttcagttccggatgcatagataaacgttgttccaacacctgctgctctttgtcgcttgcatctcccaaaagagccttttttatcaaagaggcatcttgatatgtgttttctaactttttcataattttatctatttctaatgaggattttatctttgctttactataattatacataacgtccataaatgggtgacaaaaagatgattattttttatgagacactctccgtacgaaaacagaaaagaatgaaaaactatcattatgacattattcagcaacaaaaatgacatatttaacaaaccattcccttttcggaatcaaaattcagccatcaataaatgacaattaggcatcttaaaaaatatttgtttttttccgttaccgctattaaaatgatgtattttttagcttttatcaaggagtttgaaactcatatttcatcatcatccgtcactttcgaacttagctcattgatatacaatgcgataaaagtgacgagaagcagtgacgacagagtgataacaaaaatatttcaaatcttatcgtcactttctactaaaagaatgacgcgctgtacttcataaaaaggtccttgatttaaccataaatgcctgctttattaatctattcccaatgccggaccaatgtaataagacaccgacaagacttcatttcacatacatggtcccatcgctttgcggacatgatcccatggactcacgtacgtaatccgaatggtttacagacatggaacgaacacatatagcttactaaaaatgctaaccaagctttgtttacctgttaaacataccggctcatccacttaaataagccacatcacagtcacttcacccccacaaaagcaaggatgcacagcccggtttttaataaaagataagagtaagaagtacagaataactggaatttgccagcttctcgcgtaagaatttatagctacggcttttctgagttttaaccgtattgatgctaactcccagccgggatgcgatttcgtcccacgaatgtccttcaattctcagcaggatgatacggcgttgttcggcaggaagctcctcgatatagaaataaagttgtcggatagcttcttctttcacagtcaaagcatacagcatttcctcgtcttcaaaatcttcttcctgaggcaagccattcaatatagaatcatgaatctgatggttgcggatatacaacagtgcattattatagcaggcacgataaagataattagtcagctcacgggagtcggaaaaagtacgcttaccttcccacacggatataaacacctcctgaaccagatcttctacggcatcggtgaggaacaggattttctcgacatatgagcacaaggccgcataatagcgattataaaagtccctccagattcccttatctttctggttgacacctgctactatcaaatcatctttatcgctcatacggcaacaagattaatcaaacaataaaagactctcttcaaattactgcaaaaactggttataatagatatgacttacaaatatatctgttttttcagtatgtaagttcacccctcatataaaaaaatagaataaaggggcataaaataaaaaaagagcgaataactccgccccacctaaagaatcccccataaatgggattcttttttctgcatctcaatttaccttttacctgaaaactacttttttctaatacctaatcaaaacaatctttttcctaaaaactaatcttaaaatctaataccttaattttataaactaatactactcttttgttattacctttttctaatacctaaaaatctcagtagtttcacaactacactgcaaaggtagaggtgttttggaaaacaacaagaattcttatgctaaaaaacatgttttaccttatttttttgatttatgtcaagagaaagagtggaggttgggtataaaacatacatccgaatgctgatttgatacaaattctatccaaacgctccgttcatcttctatttcatcacagggccgcgcactttttcaagtgacaaaaagtaagcttagaatgtcgaaaaagagcatttacatctctttttgaaaggaatcgaagccttgacacaaaagaaaagaagtcagaaacgttacatcttgcatatttccaatccaaaattacggcgtttttttgcgcccgccccgcctcctcctcgaaatttcggaagcaaaaaccggcagaagatacaactctcgcaacttttccgtaactttgcagcgtttgataataaataaggtagaatggattttaagtacgatgtaattgtaattggtgccggacatgctggttgtgaagcggcagccgccgctgcgaatttaggttccaaaacttgtctgatcacaatggacatgaacaagatcggacagatgagttgcaatccggcagtaggaggaatcgccaaaggacaaatagtacgcgaaatagacgcactgggcggacagatgggattggtgacggatgaaactgctatccagttccgaatcctgaaccgctcgaaaggtcccgctatgtggagtccccgcgctcaatgcgaccgtgccaagtttatctggtcatggcgtgagaaactggaaaatactcccaaccttcatatctggcaggacaccgtctgcgaattgctcgttgaaaacggtgaagtagtcggactcgtcactctttggggtgtcacattcaaagcgaaatgtatcgtactgaccgcaggaacattcttgaacggactcatgcacgtaggccgccaccaattgcccggcggaagaatggcagaacccgcatcttaccagctgacagaatccatcgcccgacatggcattgcctacggaaggatgaagaccggcacaccggtacgaatcgacgcacgcagcatccacttcgatctgatggatacacaagacggagaatgcgacttccacaagttctcattcatgaataccagtacgcgccatttgaagcaactgcaatgctggacctgctataccaacgaagaagtgcaccggattctgcgcgaagggctgccggattctcccctgttcaacggacagattcaaagtatcggtccgcgctattgccccagcatcgaaaccaagattgtcaccttccccgacaaagagcagcaccaactgttcctcgaacccgaaggtgaaacaacacaggaattatacctgaacggattttcttcttctcttccgatggatattcagatcgccgcgctgaaaaaagtaccggcattcaaggatatcgtcatctatcgtcccggatatgcgattgagtacgattacttcgaccccacccaattaaaacattcgctggaatcgaagattatcaaaaacctgttctttgccgggcaagtgaacggaacaaccggttacgaagaagcgggaggacaaggactgatcgccggaatcaacgcacacatcaactgtcacggtggtgaagccttcacactggctcgcgacgaagcatatatcggtgtattgatagacgacctggtgaccaaaggagtagacgaaccataccgtatgttcacttcacgtgccgaataccgtattcttctccgcatggacgacgccgacatgagactgaccgaaagagcatatcacctcggactggcaagagaggatcgctaccaattaatgaagaccaagaaggaggcattagagcagatagtaaatttcgcaaagaactattcgatgaaaccggcattaattaatgatgccctcgaaaagttgggaacaactccccttcgtcaaggctgtaagctgatcgaaattctcaatcgtccgcaaatcacgattgagaatatcgcggaacatgtccccgccttccaaagagaattagaaaaagcaaccactgcagactccgaccgtaaagaagagattctggaagcggcagaaatactgatcaagtatcaaggctatattgacagagagcgaatgatagcagaaaagctggcacgcctggaaagcatcaagatcaaaggcaaatttgattatgcttccatccagtcgctatctacggaagctcgtcagaagctagtgaagattgatccggaaacgattgctcaagcgagccggatcccgggagtatcaccaagcgacatcaacgtattgctggtactttccggccgataagcggcaacgtttcacgtgaaacaaatcatttaaagaaacgagataaaccaatgattatgagcaaagaaacgctaattaaaagcatccgggaaattcccgattttccgatccccggaatccttttctacgatgtcaccaccctgtttaaagacccttggtgcttgcaagaattatcgaacatcatgttcgaaatgtacaaggataaaggtatcaccaaagtagtaggtatagaatccagaggattcatcatggggcctatcctggctacccgactgaacgcaggttttattcctatccgcaagccgggcaaacttcccgcagaggtgatcgaagaaagctacgacaaagaatatggcacggacactgtgcagattcataaggacgcactcgatgaaaacgacgtagttttactacacgacgacctgctggcaacgggaggaactatgaaagcagcctgcgaactggtgaagaaactgaagcctaaaaaggtatatgtaaacttcattatcgaattgaaagacctgaatggcaaatccgtattcggagatgacgtagaagtagaatccgtattgactttataaacaaattgcttatatttgcagggcgtagagaatctacgcccttttttatttcccgctatttcatctataacgattatgaatacagaaccggaagccaaaacgaatgaatatctgagaggtattgtagcaaacctgcccgagaagccgggagtctatcagtatctgaacacagaagggactattatatacgttggaaaggctaaaaacctaaaaaaaagggtatattcttacttcagcaaagagcatgaacccggcaagacacgagtattggtcagcaagattgccgatatccgttacatcgttgttaacaccgaagaagatgcattattgctggaaaacaatctgatcaagaaatataagccccgctacaatgtattgctgaaggacgacaagacctacccttccatctgcgtacagaatgaatactttccacgcattttcaggactcgaaagattatcaaaaacggttcttcttattatggtccctacagccaccttccttcgatgtatgcggtgctcgatctgatcaagcatctatatccgctgcgtacctgcaatctgaacctttctccggagaacatacgggcgggaaagttcaaggtttgcctggagtatcacatcaagaagtgcgccggaccatgcgttggactgcaatcgcacgaggattatctgaagaacatcgatgaaatcaaagagattttgaaaggaaatacgcaggatattagccgtatgctggtagaaaagatgcaggaactggccaatgaaatgaagtttgaagaggctcagaagattaaggagaagtatctgctgatagagaattaccggtctaaatcggaggtagtaagttctgtcctgcacaatatcgacgtcttttccatcgaagaagacgattcaaattcggctttcgtcaactatctgcacatcaccaatggcgccatcaatcaggcattcacctttgagtacaagaagaagctaaatgaatcgaaagaagagttactgacgctaggcattattgaaatgcgggagcgctacaagagccattcacgggagattattgttcctttcgaacttgatctggagttgaataatgtcgttttcaccgttcctcaaaggggagataagaaaaaactgctcgatctttctatcctaaatgtgaagcaatataaggccgaccgattgaaacaagccgagaaactgaacccggagcagcgcagtatgcgtctgctgaaagaaatacaaaacgaactgcatttagacaagccacctttgcagattgaatgtttcgataactcgaatatacaaggatcggatgccgtagctgcctgcgtagtattcaaaaaggcgaaaccatcgaagaaagattaccgtaaatacaatattaagacggtcgtgggaccggatgattacgcttccatgaaagaggtggtcagacgacgttatcagcgcgccattgaagaaaattctccccttcccgacctgattattaccgatggtggtaaaggacaaatggaagtcgtcagagaagtaatcgaggatgaactgcatctgaatattccgattgccggtttggctaaggataataagcatcgcacgtcagagctacttttcgggtttcccgcacagacgattgggatcaaacaacaaagttctttattccgtctgctgacgcagattcaggatgaagtacaccgttttgcgattactttccaccgcgacaagcgcagcaagcgacaggtcgcatcggctctggatagcattaaagggattggagaaaagacaaaaacagccctattgaaggagtttaaaagcgtaaaacgaatcaaagaggcatcccttgaagaaatcgcaaaggtcataggagaagtgaaggctcagactgtaaaaaaagggttaagcaacgaataggctcacttctatgtggctatacgctaaattgttagtccatataaatcaagtatcagtatcatatggggcaagcgttagtttcctcggaggaaacgccagttccctttaaaaggaacggtcgtttccattaaaaggaacggccgttccctcgccgggaaacgacagtttccattaaaagaaatcataggaaactatataccattgatgtgtactggttttagttgacaacttcgtttgttataactgaattagtttactcaatatactttaatatctaaataggtttacttttgttattcttattcctatgttagttgtcttttgttggtgcttgcaaatttatgcatcttcctttatttacgcaagccttcttcaggaaaatgtaatgttgccaacaaccaaaaactcttcggtcggggatcgccctagcggcaaggggcgggaccacccgtcccgacgagcgggtattatgctgttaatcctcccgtttcgctgaccacttccataggtgtcctcatgtttatcccttgatgaggccgcacatgattatatacatatacagcatcttcaatgcgcttgcttacttgctcgaagctctcatcatcacagtcgaatagccaaccgtttttaatggtgttgttcattctttcagccaatgcattatgtaaaggatcaccacactgcgtcatactgatgttgatttgatgctctttaagcctctctacatatttatttgagcaatattggacaccccggtcggaatgatgaataagagtgctcatgtctatgtgatacttctcatagaatgatattgccatctccaaagctttcaagggcccctccgtctcaagagttttgtaaagcgcatatcccacgatggcacgacttgacgcatcggtaagcaacgagaggtaagcccagccctgaccggtgtttacgtaggttatatccgccactaccatagcgcccaatcttgtagcgacaaatttgggtgcaacattcaacagatcggggtagatatagtaattatggttcgaattcgttgttttaggacgcttgcgacttgtacgttgacacaaaccattggagcgaaaaatgtcatagcaacgatcacgaccgataaccatctttggtccaaacttactcacgcagcaggcgtataactcgcgcataccagctttgggcatgagttccaacagttctttgcagtacaacacgatgcttgtggtaaggatatcaacctccaaatgtcggttcacatgcttgtaataaccttgtcgggttatgccgaagtaatcacagaggaactttatacaaccacgtttgcgtcggggtgagtgcctctgtgacaaggtgtcgattacttggcatcggagttttttcgtaccttgatatgatacgtggattcagcaagattgatgagttcttcgcacgcctcgtgacgtaaactctcatcagcaagagcccgatgaagtttacggttctcagcacgcaatagcgatagttctttctggagctcagaaatactagaatcaatagcatcgctatttactggtttagaggatctacccatatctttgtcttctatttgatacttgttaagccaataagtaagaagcttggcacaaaagccgttacgcttacaaaactcagatttgctctcgggacttgataaatactcacgaatataagacattcgttcatcatcactgtaatagttgtactgctttttcgaatatttcatctttattttcgatttttgaagtgtcaacttattcagtacactacaccattgatttctaaccatatagaatactaccggtaatgttatagagtttatgttcatgtctatacggttctaaggcaaactcaatcaagttatgaggcaaatacatctgtcgtcctaatagatatgcttctgcacaacagacagacacgcttccgaatgacagctacggttaatacttaatacctaatacttatctcctataatatttccttccaatccatcgttttttcttcttaatttcgtaaatttgcctttcgtaacattcaatagaatagagaaaatatcaatgagaatagttgtacaacgagtaagccacgcatcagtaaccatcgaaggacagtgcaagtcttccattggaaaagggatgctgatattagtcggcattgaagaatccgacggacaggaagatatagactggctctgcaaaaagatagtaaatctgcgtatttttgacgatgaaaacggagtaatgaacaagtccatcctggaagacggaggcgaaattctggttatcagtcagtttacattgcacgcttctaccaagaagggcaaccgtccgtcatacatcaaagccgccaagccggagatatctgtcccactctacgaacggttctgcaaagacctgagcagggcgctgggaaaagaaatcggcacaggaactttcggagcggacatgaaagttgaacttttaaatgacggtcctgttactatatgtatggacaccaaaaataaagagtaaaaccttgatgaaaaagccggtaaagctcttcgaagagtgataaacaggctctaaacatcaaactaatcatcataaaccaacagcaattatgaccctggaagaagcccaaaaagaagtagacaaatggataaagacatacggtgtccgctacttcagcgaattgacaaatatggccgtactgactgaagaagtcggagaattagcccgtgtcatggcccgcaaatacggcgaccagtctttcaaagaaggcgagaaagacaaccttgacgaagaaatagcagacatcttatgggtgctcctgtgtatcgccaaccagacaggcgtagacatcaccaaagccttcagggaaagcctggaaaagaaaacgaaacgagataataaaagacatatcaataacccaaaactgaacgatcatggaagagaatagctcacaatccaacaagtatgatgccgcattggcaaagtataacaccaatctgagcgatgcagacatacaggctcgggtggctgacctgattgaaaagaaagtgccggaaaacaatacggaagaagtcaagaaactcctgttcaactgcatcgacctgaccacgctgaacagcacggacagcgatgaaagcgtgatgcatttcaccgaaaaagtgaatgagttcgacaatgagttccccgatatgaagaacgtcgctgccatctgcgtataccccaatttcgcggatattgtaaagaatacactgcaagtagatgacatcaatatcgcttgtgtttcgggcggattcccttcttctcagactttcatcgaagtgaaagtagcggaaacggcactggctatcgctgacggtgcggacgaaatagatattgttatctctatcggtaaattcctgagcggtgactacgaaacaatgtgcgaagaaattcaggaattaaaagaagtctgcaaggaacgccacctcaaggtaatcctcgagacaggtgctttgaaaaccgcctccaacatcaagaaagcctctatcctatccatgtattcgggtgcagatttcatcaagacatcgaccggaaagcaacagcctgccgctaccccggaagccgcttatgtgatgtgcgaagctatcaaggagtactatcaaaaaacaaacaacaagatcggcttcaaaccggcaggaggcatcaacaccgtccatgatgcaatcatttattacactattgtgaaggaaatattaggcgaagaatggctgaacaaccgattgttccgtctgggtaccagtcgtttggccaatttgcttctctccgatatcaagggcgaagagatcaaattcttctaaggaattacattagcaatcaagtatgccgtaccgcgcttcaccttccgttcctatggaaggaagcgcggtattttttatataataaaaactaaagatacttatggacaaaaccattattttcattatctttgtcatagatgtagctatgctaacatagttaatcatccgtattagagaacgtttcttttattacctgattcctggaattcggcaaaattcaaagttatgagtggtaataagcaaacgggtctcacgcaccttcatgtatatacttttgttatatatcgaacggagcgtgagactgttgcttttatgtcatcataacggcttgccgaagccccaggaaaagacatatagcagcagttctcacgctttttttagttaaccataagcgaaaaagtataaaatgaagtcacacacaaagaacttacgttttaaccataaccccttaaatctgatactcggcaccagaaagaaacaaggtctgcgcatcggttatatggaggctgcactggatggcttctatcttaactgtatagaaaccggagtacacccggaaaaactaagtaaactattatcagataagttccattgcacagatgcaatttcttcctgccagctattcctattcctcatcaacgaaggcgacagagcctcctattctattatggtcccctatttactctctaccgaaaacctaaaccagtttgaaaacaccatccgcgaacgcttctacggagtagaccgattcattcaacagggcagaaatctatacaaattcaaagagtatatagaagaaagaggagagccgattgtatggattaatgacttagagagaggagtgatcggatgggatatggcacaagttgtcgggctggcccgggctgccaaagactgcggctacatcaccaaagaacaagcatgggaatacatcgaacaggcgagcacgttatgttccgaaatcctccgcacaccggaagaaatagacaaaagtttcctcatcggaggagcgatgaaatcgaataaaattgaagattgggaggaattaatcctgtgctactctctgctcagaaacagtggggagtagttatttctcacgatcgaccacataatccagataagtccggagggcaacgcaaatatttgaatccggcaaggtagccagcaaagcaaaagctttctttttatattgttctatcgtacgacaggcatattcaataccgccattatctttggtaaactcaatcagacgtacgatttcatcgggagttgccgtaccttccttcaccttgaacgctatctgttccgcccacgcatctttcgttgtattcaatgcatacagggcaggcagcgtcagcttaccttccagcatatcattaccagtcggtttgccgatcttcttgctatcaaagtaatcgaaaatatcatccttaatctgaaaacagataccaatatattcgcccaacagacgggcaaaagcgacttcctcctcacccacctgcactgacaaggcagccgcctcggcacaagcggcaaaaagagccgctgttttcttacgtattacgtcaaaataaacttcctccgaaaagctatgattacttacattcgaaagttgaagcaactctccttcagctagtttctgccccagcgaagataccagacggataatctcataattattagtctgctccgcgtgcacaaggcttgtagccagcagataatcacccgccagtacagataccttattattaaatacagcatttaccgaaagctgaccgcgacgctcggtactttcatcgactacatcgtcgtgcaccaaactggctgtatgaagcaattccaaagaaactgccgcatgaagggtggcaggagtcacagccccataaaggcgtgctaccaataagacaagaataggacgcatcatcttgccattcctcttgcgtatatgagttattacgctgtcgagcaatgcattcgaatcggaaagaggggtgtcaaaaagagctttaaaatcctccagttccgcttctatcggggttttgataagagagatactatccattcacaacactatttgagcacaaaagtaataataaaacgcttaatacggtatttttttgtacttttaccatgaaaaattaattaaatctatggagtcagacaataaattatttcttttagacgcttatgcactgatatatcgggcttattacgcctttatcaagaatcccagaatcaactccaaagggttcaatacttcagctatcctcggatttgtcaataccctcgaagaggtgctgaaaaaggagaatccgtcacatataggagtagccttcgacccctccggccctaccttccgccacgaagctttcgagcaatacaaagcccagcgtgaagaaactccggaagctatccgcctctccgtacctattataaaggatatcatccacgcctaccgcatcccgattctggaagtggcaggatacgaagccgacgacgtgatcggaactctcgccactgaagccggacgtcagggcatcaccacctatatgatgactcccgacaaagactacggccagctggtgacggacaacgtattcatgtatcgccccaaacatacgggaggttttgaagtgatgggcatcgaagaagtgaaagcgaagttcgatatccagtcgcccgcacaagtaatcgatatgctcggactgatgggcgatgcctccgacaatatccctggttgtcccggtgtcggtgaaaagactgcccagaaactaatcgccgaattcggaagtatcgaaaatctgctggaacataccgaccaactgaaaggagccttgaaaacgaaagtggaaaccaataaggaattgattactttctccaaattccttgctactatcaaaatcgatgttcctatccaactcgaaatggacaagctcgtccgcgaacaggcagacgaagattcactccgacaaatttttgaagaactggaattccggacactgatcgaccgggtactgaaaaaagaaaattctgccggcggagtaacaatggcaaccggaagcaaaacggcaacggccaaaagtgctccctctcctcttccactttttcccgaagaaggaggagccatacaaggcgatttatttgcgaattttacgggcaatgaggcaggcgaagccaaaaaatcgaatctagagacgttagaaacgcttaattgcgactaccaactcattgatacagagaagaaaagagctgaaatcattcaaaagttacttacatcgaaaattctctcgttagacacggagactacaggaacggaaccaatggacgccgaactggtcggaatgagtttctctatcaccgaaaatcaggctttttatgtgccggtccccgacaatcgtgaggaagcattaaaaatcgtcaacaagttccgtccggtcttcgaaaatgagaactcattgaaagtcggacaaaatatcaagtacgacatgatcgttcttgaaaattacggagtgcaagtgaaaggtgcgctctttgatacgatgatcgcccattacgttcttcaaccggaacttcgtcatggaatggactatctggcagaaatctatcttcactatcagaccatccacatcgacgaactgataggtccgaaagggaagaaccagaaaaacatgcgcgatctcgacccgaaggatatctaccgctatgcctgcgaagatgcagacgtaacactgaagctcaaaaacgtcctggagaaagaactgaaagagaacgatgccgaacgtttgttttatgatatcgaaatgccgcttgtacccgtattggtcaatatagaacggaatggggtattgctggatacggaagcgctcaaacaatcgtctgttcatttcaccgctcagatgcaacgcatcgagcaggaaatttatgaactggcaggcgaaaccttcaatatcgcttcgcccaaacaagtaggcgaggtactgtttgacaaactaagaatcatcgaaaaagcgaagaagaccaaaaccggtcagtacgtcacttcggaagaagtgctcgaaagccttcggcataaacatcccgtagtagaaaagattctggaacaccgcggactgaagaaactgctgggaacttatatcgatgcacttccccaactgatcaacccgcgcacgggacgggtacacacgtctttcaaccagaccgtcacctctaccggacgcctcagctccagtaacccgaatctgcagaatattcctatccgcgacgagaacggtaaggaaatccgcaaggcatttatccctgacgaaggctgcctgttcttctctgccgactattcgcagatagaacttcgtatcatggcacatctcagcgaagacaagaatatgatcgacgccttcctcagcaatcatgatatccacgcagctacagctgccaaaatatataagatcgacctgaaagacgtagactccgatatgcgacgcaaagcgaaaaccgccaacttcggtatcatctacggcatctccgtatttggccttgcagagcgaatgaacgtagaccgaaaggaagccaaagaactgatcgacggctatttcgaaacttatccaagcgtgaaagcctatatggagaagagtatccagatagctcaggagaaagggtatgtagaaacgattttccaccggaaacgcttcttgccggacattaactcacgaaacgccgttgtacgcggctatgccgagcgaaacgccatcaacgcaccgattcagggaagcgccgcagatatcataaaggtagcaatggcacgcatttatcagcgattccagacagaaggcatacaagctaaaatgatattgcaagtacacgatgaattgaacttcagcgtgcccgtcaacgaaaaagaacgtgtagaagagatcgttattgaggaaatggaacacgcttaccgtatgcacgttcccttgaaagcagattgcggctggggcaagaactggctcgaagcacactaaaacaaggtttatcctgccataacaaaacaggataaatcagctaaataatggagaggatgagttataacattatttaacccactatccagaaagctaggaaaaagatcacttccccaacgaagtgcttcattctatatccggcaggttgactgccggatatttttttgtcaccaatcttggcaaaaagcaaggtatcaccttagccatcatctgacattttgatattattttagctttatatttgtataaataccgaataaatatataactttgcagcgtaatacaagagtattactagacaaatgaaagaataatactaaaatcaaatagccatgaaaacaaaagtatctttaaaaatgtttgttctatccgtagttcttctcatgacctcttttgttgcttctgcacgcagttatgatggtcagttggtttataatccagtagaagaaaatggagtaatggtaggtcagaccgtttacaaaatgaacggaagtacacttgccaactatatgaagtataactacaagtacgatgacaacaagcgcatgattgaaagcgagaccctgaaatggaacagtaccaaagaggaatgggaaaaagatctccgcatcaattatacatacgaaggaaaaactgtaacaaccaattactataaatggaacaataagaaacgcgcttacgtgttagttccagaaatgacagtgaccatggacaatactaatttgtaacagcatttttttaacaacatactctctcattctaatattctaacaaagagaaaacgccgttcctgatgaagaaacggcgttttcgcatctatcttaagaagtaattgtcacaacacaaaaaaccggtcctgcaaccctttcagaaaacttcgggaaatcaccaaatcactcttatcatgaaaaggcggatagagctgacaacacttcccatcaatcatcgccagataattaacattaacaatagccgactgactgatctgaataaaagcttgtgaataaccaatgatatcttcggcttttgtatttcgcttcagattcaatcgggtctgattgaacaggactacctgccactgccgcttgtctttcaaatattcgaaataaccgatctcttccagtctcaaaagcttgaaacctgtcaccgtactgatcataaacattccctgttgcggcatcaaagcgctgacagaagaagaaaaagaggaagaaggagttgccggtatcgaagctacagccttccggtagcgctctataacaactttcagatcttccgtctcaaaaggtttcagtaagaaatcgaaggcggactcacgcagagcctgaagcaaatatttatcatacgaagtataaaagacaactttcatatcccacagcacctcatcgcgcatctcactcaacaagttaagccccagcacatccggaagttccacatccagaaacaacagatccggacggagttccattatcatctttttgccttttgcgccattgtttgcagttccttttatttctaattcctgataagcgcccagctccctgcgcaaagcatcgattgccgtacgctcatcatctacaataacgactttatatttatcttctgcattcatcataaatcataagaaaaatgaaacggtataaacaccgacacttgcgtaccggtctgcccatcgtttcggttatctatattgaaacgtatcttctcatttttattctttgtattgagtagctgtatcgtttgatagagcactttcagccccgttcccgttcctctggtcgaagaagccacttgcggaagatacccccgcccgttatcacaaatcacgatacggactccttttccttcacgggaaatacggatagtcaattccttctcaccgtcttttccggccagcccgtgctttatcgcattctctaccggaatctgtacaatcatggaaggaatcattatactttttgcgtccagcccctcctccactacgaccgacgccgtgaactcttcgccgacacgcccgctttccaagccaatatatgactgtacaaaatccagctcatcctgcaaagaaacacttagtttttctgtcagttcaagactccggcggagatatttgaccagttccatcagattattcttcacctcttccgatccattgaactgattaatttcacgccccagcacattgaaagtgaaatggggagaaatccggccccgcaaattctccatacggacgcgatttatctgttggaagaaacgttcacgaagaaactcccgttttttccgcatataccagatgattaccaccgttccggctgccagcaacaggcagacaagcacccagatatacatgctcagtttcaatacacgcacttcacccgcttgtcgttgaatctgcatttccttgcgcaatacgatcgtgtcctgacggtaacgcatatccagttcggctacacgggtacgaatccgttcgctacggatggagtcattcagttgataatcacgtttcagatactcatatgcattacggtagtcacctgccttttcataataatgttgcagatactggttgcgtatagtaagcatattggcatccacgtgtccggtagaagcagtccgtgctatcatttccctggcacgagcgatatttccttttttcagagaaagctcaatcatcagggtttcaatgtagtgcatggcggagttgttctttatctccgaaaagtaacggtaaccttcattcagattgttttcggcagaatccagccggttcgtcagcagataaagatcgcccagattaactttcgaaagattgctttcgaataccatttgcgggtaatccgctatcagctccgctgcttgccgcatataaaccagggcttcctgataatctttcttataatagtaatgatttccccgattattaagatacacccacttttcgctgactgtcatttcatcaaagaactgtcctgccagttcgtaataatgattggacaaatcaaaatcacgcagatccatgtaagtctgtcccagtccgcaatagaccggaaatttggaatgttccgacagatgcagggagtcacagataaacaatgctctccggtaataggaagcggtatgtgccagttcgccacgatgcagatgggcatccgccagattcatacagatatctgagagaagatgtcccttctctcctttcagacggtaagcataggatttctcataataggcaaccgccgaatcgggctgattgagttgcatccagacatttccctcaatgttatacacatccgaaagcacatcattccatcgcgggcaggcagctgcacgcttatcatactcttttacagggcggttataatagaggatagagtcgaaatcggacgagatgaagaaagtctttccatacaatcccatcaagcggtaataactcatcgagtcctgtgcctgacgcattgcgttacgtaataaagaacgtgaataaggtaagttggaaaacagagaatcctgtgcacggacttctaaagaatcgataagtgactgttcacacaaagcgtgactgcggtgcctatccacgcaactgcagttccacaatatcaacaaccctatcaacccaaatagcttcatagtagatttcgctttattcatcccctttgtccgtgttgaattttgaatgccacaaaaatacattaattatattgaatctcaacgaaatttattattttttttaatacctttgtccccatataaacatgagtaactgacctaatgagtccattgaactttacccacattctgacacaggcagtcgatgagctatcggaaagcgaatcttacaaagggctgtttcatcaacataaagatggcgaaccattgccctctgctaaagttttgtatgaaattatcgagctttcacgtgccattctcttccccggatactacggaaattccaccatcaacagccggacaatcaattatcacatcggtgtaaatatcgaaaagttatttgacttgctcacagagcaaatcctggccggactatgtttcagtacggctgaaggagactgcaatgtctgctcggagtcgagaagagaagaagccgcccgactggctgcgaactttatcagtaaactacccgccatgagaagaatactggctacggacgtagaagctgcctacaacggtgaccccgccgccaagagctacggtgaagttattttctgttatcccgccattaaggcaatcagcaactatcgtattgcgcacgaactgctggaactgggtgttcccctgattcctcgcatgatcacggaaatggctcatagcgagacggggatcgatatccatccgggagcgaagataggcagtcactttaccatagaccacggaacgggtgtcgtgatcggcgctacaagcatcatcgggaacaatgtcaaattatatcagggtgtcaccctgggagcaaaaagcttcccgctggatgccgacggaaaaccgatcaagggtatcccccgccacccgatactggaagacaatgtcatagtctactcaaacgccaccatccttggaagaattactatcggaagcgacgcaaccgtaggaggaaatatctgggtaacggaaaacattcccgccggagcaaagattgtacagacaaaagcaaagaaataaaatcaataaactatatatgagcgaacaattcgagatgatagccaagaccttccaaggactggaagagatacttgctgaagaacttacaacactaggagccaacgatatccagataggacgtcgcatggtttcatttacaggagacaagcgtatgatgtacaaggcaaatttctgcctccgtactgctatccgcattctgaagccgatcaagaattttacggcaaaggatgctgatgaagtttacaaccagatacaggccattccatgggaagagtatcttgatgtgaacaagacgtttgcgatagacgcggttgttttcagcgaagaatttcgccattcaaagttcgtttcgtacaaagtgaaggacgccatcgtggactatttccgtgaaaagacaggcaaacgcccgtcggtacgcatcaataatccggatgtactactcaatatccatattgcacataccacttgtacgttgtctctggactcttccggagagtcgcttcatcgtcgcggataccgccaggaacaggtagatgctccgttgaacgaagtattgactgccggtatgcttctgatgacaggatggcgcggtgaatgtgacctgattgacccgatgtgcggttcgggcacgattcctatagaagctgcactgatcgcaagaaacatcgctccgggagtattccgcaaaggattcgcattcgagaaatgggtggatttcgattcggagatgttcgatgagatttacaatgatgatagtcaggagcgcgaattcacccataagatttacggatatgataacagtccgaaagcgaatgaaatagcgacgcataatataaaagcggcgggtgtatccaaagatgtgacgctgaaactgcaaccgttccagcaattcgaacagccgcaggagaagtccatcatcgtgatgaatcctccttatggcgaacgtatctctaccaatgacctgctcggactgtaccagatgattggcgaacgtctgaagcatgcatttgtaggaaacgaggcttgggtactctcttatagagaagaatgcttcgatcagatcgggctgaaaccaagcaagaaagtgccgttgttcaatggcgcattggaatgcgagttccgcaaatacgagattttcgacgggaaatataaggagttcaagagtcaggagggagaaggagaagagaagaaagagactgaaggaggctatgatactcccagacccagagaaagaaaggaattcaaaccacgcagagaaggcgagtacaagccacgtcgagaaggggagttcaaacctcgtaaagaaggagacttcaagccgagacgggaagaaggaagctttacccgggatgacagggacagaaagcctagaggcgagttccgtggggaaagagattcaagagctccaagagaattcagaggaaatcgggagcctaggataccgaagaaggaagaagagtaatttcatagatagttaacggcatctcactaaaaaaatgccattaacttattgatagacaatataaggtcgcattttgcgatcttatcatttgatgagtaagaaagcgaattgaatatctcgaaaaaaacgtatcatccgacagagaaagacaactctcctgaacagggtaaaatagaaggatttaaaaccaataaagataaataaaagcaatgagtaaaattggaaaaagagccattctgatattgctggcgctaccaatcggattcaatgttatggcacaggaaatcaaaaagctgacactggaagagttgattccgggcggcgagacctaccgttatgcagaaaacctctacggtctgcaatggtggggagacgtgtgtatcaaaccaagtaccgacaccatctacactgttcaacccagaacagggaaagagacagtgctgactaccctcggacaaatcaacaaagtactggcagacaataaagcagggaaactgccgaccccgtactcaatccgctacccgtgggcggacaaaccgcaaatgttactgaaagtatccggtaagtacatcgtatacgatttcgagaacaaccggattgtcagcacactgaagttgaaagataaagcagccaacgaagattattgcgtcgccaacggaaacgtagcctacacagtcaacaacaacctgtatgtgaacgaacaggcaatcaccgacgaacccgaaggcatcgtctgcgggcaatccgtccaccgcaatgagttcggcatcaacaaaggcaccttctggagcccgaaaggcaacctgctcgctttctaccgcatggacgaaagcatggttacgcaatacccgcttgtagacatcacggcacgtgtaggagaagtgaataacgtccgttacccgatggcaggaatgaccagccaccaagtaaaagtaggcgtctacaacccctccaccggcaagaccatctatctgaatgcaggtgatccgaccgaccgttacttcaccaatatcagctggtcaccggacgaaaagagcatctatcttatcgaactgaaccgcgaccagaaccacgccgtactctgccaatacgatgcaacgacaggcaagttactgggcaagctgctggaagaaacgcaccccaagtatgtagagcctcagcaccccatcgtattcttaccgtgggacagcagcaaattcatctatcagagccagcgtgacggatataaccatctatatttatgcgacctcacctccagcctcaaaggcgaatggaaaagcgatgccgcaggcggcaagcacatcgaatacatcccgacgaagcaactgaccgagggcaagtggctggtaggcgacattctgggcttcaacgccaagaggaaagaagtcatcttccaaggagtagatggcacaggctccaataactttgcagtaaatgtcaacacaggaaagcgcagcctcccgttcagcttccgttctatcacagaaggagaacataacggaatgctcagcgcatcgggaagctacctcatcgaccgttattcgactcccacccttccgcgccgcattgacatcgtggacaccaaaagcctgaaaacagtcaacctgctgacagccaaagacccatacgaaggctatgagatgccgaccatcgaaaccggtactattaaagccgacgacggaacgaccgacctatactaccgcctcaccaaacccgcagatttcgacccgaacaaaaagtatccggtcatcgtctacgtatacggcggtccgcacgcacaactcgtcaccggtggctggctgaacggctcccgcggatgggatatctatatggctaacaaaggctatatcatgttcaccctcgacaaccgcggcagtgccaaccgtggactggagttcgaaaacgccaccttccgccgcctcggcatcgaagaaggcaaagaccaggtgaaaggcattgaatttctgaaatccctcccctacatagacggaaaccgcatcggtgtacacggatggagcttcggaggccacatgaccactgccctgctgctccgctaccccgaaatattcaaggtaggcgtagccggcggacctgtcatcgactggggatattacgaagtgatgtacggcgaacgttatatggacaccccggaaagcaatccggaaggctacaaagaatgtaatctgaagaaccttgccggacagctgaaaggtcatctactcattatccatgacgaccacgatgacacttgtgtaccgcagcacacgctgtcgttcatgaaagcctgtgtagatgcccgcacctatcccgacctgtttatctatccgtgccacaagcacaacgtatcaggccgcgaccgtgtacatctgcacgagaaaatcacccgatactttgagcagaacctatagcaacctataattgacagctcacagcatcacaccgaaaaactcataactgaaaactcataacttaatactcattatgaagatattattactaggctcgggcggccgcgaacatgcactggcatggaaaattgcccaaagtccgaaagttgaaaagctgtacatcgctccgggaaacgccggaacaaacgccgtaggcgagaatgtcaacatcaaagctaccgactttgaagcgatcagcgctttcgctctgaaagaaaacatcggaatggtggtagtaggtcccgaagacccgttggtagaaggcatctacgattacttccagaatcgtcccgaactgaaacatatcgccgttatcggtccgtccgccaacggagcacagctggagggcagcaaggagtttgccaaaggcttcatgatgcgtcatcaaatcccgacagcccggtataaaagtatcacagccgaaaacctcgaagaaggtctggctttcctcgaaacgctggaagctccatacgtgctgaaagccgacggactctgtgccggaaaaggcgttctgatcctccccacactggacgaggcaaagaaagaactcaaggaaatgcttggcggtatgttcggctccgcatcggcaacagtcgtaattgaagagttcctgagcggtatcgaatgttccgtattcgtgcttaccgacggcgaacactacaaagtcctccccgtagcgaaagactacaagcgtatcggtgaaggcgacaaaggactcaacacaggcggtatgggcagcgtgactccggttccttttgccgacgaagaatacatggaaaaagtacgtacccgcatcatcgaacctaccatcaacggactgaaagaagaaaacatcgtctacaaaggcttcatcttcctcggactgattcgggtgaaaggcgaaccgatggtgatcgaatataacgtccgcatgggcgacccggaaacggaaagcgtgatgctccgcattcagagcgacctcgtggagttgctggaaggtacagccgcaggcaacctccacgaaaagacactggtcatggacccgcgctcggcaggttgtgtgatccttgtcagcggcggttatcccgaagcatacgaaaaaggcttccctatcagcggtctggaacaggctgccgctaccgaaagcatcattttccatgccggaacagccatgaaggacggacaaatcgtaacgaacggaggacgtgtgatcgctgtctgctcttatggcgcaacgaaggaagaagcgctggcacagagctataaagtggcagatatgatcgacttcgacaagaagtatttccgtcgcgatatcggattcgacttataatgaaaagcaagagactacaaggtctggtcacagcagggcggtggacactccctgctgcgattttcatctgcaccctttgttgggtgctgacctctgccctattgcccgaactcaccatgacagcgggcgaagaaggcggttccgtgctttggcagtctgcccgcacgttgctgctccccgcatgggcggagcatcttgtcagtttcttgatttacgcggctatcggctatttcctgatcgagctgaacaaccggttcagtatcatccgtatgcgggcttccgtgcagacagccatctattttctgctggtcaccgtctgtccggagatgcaccttctatatgccggaaacgttgccgccatagcctttttattctccatctatttcctgttcaaaagttaccagcagtcgcaggcgtcaggatatctgttctactcgttcctgtttatcggtgcagggagcattctctttccccagctcaccttcttctcggtgctctggttgtttgaggcgcatcgctttcagtcacttacgttccgtagtttctgtggcgcgctggtaggatggacaatgccctactggatgctgttcggacacgctttcttctatgatcagatggagctgttctatcatcctttcaaagagctggccacttttggagacatattcaacctacagatactccagccgtgggaactggcgactctcggttatctgcttgtgttgttcatcgtcagcgccgctcattgcgtcgttgccggattcgaagataagatacgcacgcgcgcctatttacagtttctcatagacgtgacactctttctcttcgtactgattgtgctacagccgtcacaatgcagcaatctcttgccgttgctcatgataagcaacagcatactgatcggacacctttttgtgctgaccaacaacaaaacatcgaatatattcttcattgttgccacggtctgcctcatccttttatttggttttaacgtatggacgcttttatagattcaacgatacaactcctcatcgaatggggacttccgggattgtttatctcggccttactcgcagggagtattgtaccattcagttccgaactggtgttggtagcactggtaaaactcggactgccacccactgcctgtatattggctgccaccctcggcaatacggcaggcggaatgacctgctactatatggggcgtctgggcaaaataagctggattgagaaatacttcaaagtaaagaaggagaaagtagacaagatggtgaaattcctgcaagggaaaggagcattgatggcattcttcgctttcctgccggccatcggagaggtgatctccatcgcactgggatttatgcgaagtaatatatggcttaccaccgcctccatgtttgtcggcaaactgatacgttacattctgcttctgtatgtactggaaagcgcatggaacgtcgttgcaggatgaaataataggtaataagtaacaggtaataggtaataagttttttgagatgaaaagagtgattgaaaagactgatgacgggagtgccaccctatttgttccggaattgaatgaacattatcattcgaccaaaggagcacgtacggagtcccagcatattttcatcaatatgggcctgaaagcctccggtgccccctctccgcatattctggagatcggtttcggaacggggctgaatgcttggcttacacttgaagaagcagaaagaagcggacgtaacgtacattatacaggacttgaactctacccgttggaatggcagatggtggagcaattgggatatttagaacaaccagcagctatcgacctgttcagagcaatccatacattaccgtgggaagaagaaatatcctttaccccacacttcactctctgcaaagtacaagccgacgtcaatgaatggattacccagcgcagccattctccattatccattatccattatccattatcattcgacgttatctatttcgacgccttcgctccggaaaagcagccggaaatgtggtcgcaggaactatttaaccgtttatatgttttattaaatgaaggaggcatcctcaccacttattgtgccaaaggagtcatccgacgtatgctgcaggccgcaggctttaccgtagagcgccttcccggtcctccgggaggaaagcgggaaatactacgtgcccgaaaacaggaactgaatcaacccccgatattaatacaatagtcatgaaacaacaactaaaagatttgaaaacactccttcttctcggctcctgcctcctgttggcagcctgcacgggtcgcacgtccaaagcaagcgacagcgaagaagagaaaccggtgattaccgtcactatcgaaccgcagcgctacttcacggaagcaattgccggtgataaattcacggtagtcagcatggtcccgaaaggttccagtccggagacatacgaccctattcctcagcaacttgtctctctgggagacagcaaagcctatctccgcatcggctacatcggctttgagcagacctggatggaccgactgatgaataacacccctcatatccaagtattcgacacctcgaaaggtatagacctgattctgaacaacggtgagcacaaccacgcagcaggacatcatgaccacgacgggcacaaccacgccgtagaaccgcatatctggaactctaccaccaacgccctcatccttgccggaaacaccttcaaggcactttgtatgctcgacaagcccaacgaagcatattatctggcacgttacgactccctctgccaacgtatccagcacaccgacagccttatccgccggcaactttccgctccggaatcggccaaagcctttatgatttaccatccggctctctcttactttgcccgtgactacggcctgcatcagatttcaatcgaagaagggggcaaggaaccttcgcccgcccatctgaaagaactgatagacctgtgcaaatcggagaaagtaaacgtcatcttcgtccaaccggagttcgacaagcgcaacgcggaaaccatcgcacagcaaaccggcacaaaggtagtccccatcaacccgttaagctacgactgggaaacggaaatgctgaacgtagccaaagctctcacccctatggaccccgaataacaacgggcctccatagcgttaatgaccgaatgatacataaacgaagtaattctccaaatatgaaaccgattatcgaaataaagaaccttgctgccggatacgacggccgtaccgtactccacgacgtcaacctgaacgtttacgaacgggactttctgggcatcatcggtccgaacggaggcggtaagacaacactcatcaagtgcatcctcggtctgctgaaaccgacagccggagaaatcaacttccatgcccctacagaagtatcctcccactctcaactttccacttccaattcttcactttccctcggctatctgccgcaatatagcaccatcgaccggaaattcccgatttcggtagaggaagtgatactctccggactaagtatccagaaatcccttacctcccgcttcactcccgagcaaagagaaaaaggcaagcatatcatcgcccgtatgggactcgaaggactcgaacaccgttccatcgggcagcttagcggcgggcaactacaacgtgcactgctgggacgcgccatcatctccgacccttcggtactgattcttgacgaacccagcacgtatatcgacaaacgcttcgaagcccggctctacgaactgctgtcggagattaacaaagaatgcgccatcatccttgtcagtcacgacatcggcactgtactgcaacaagtgaaatccattgcctgcgtcaacgagacactggattaccaccctgacacgggcgtctccacagaatggctggaaagaaacttcaactgccctatcgaactgctgggacacggcacgttgccacaccgcgttctcggtgaacatcatcatcatcactaaacattcatttgccggtgctacatcaaagaacggccgcactgcatatcagccatttacaacggtcacatcaagcagcaacaactgacttctcaactgttaatgattgagatgtcagatgttaatagttgacatgtcaggtattaacagttgaaaagtcagctattaatgtctgacaacgcaagtattattgaccaacaaatgattcattgcttggtataaaagacacaaaattggtatcttcatacctaccgttgtttatactgtttagtgattccactgtttccctaaaaggacataagataaagtaaatcacctttccgttacttaatatttcttactttctgcctcattatccttacaaatcactatctttgcgcccacgtaatctgttttttaacgaaaaatctagatagtgctaatgaaacagtacagaactataaacaacctcgtgggttggcttacattcatcattgcggcaacggtctactgcctgacaatagaaccgaccgcaagtttttgggactgtcccgagtttataactaccggttataaactggaagtaggacacccgcccggcgcacctttcttcatgctggtagcgaacctgttctctcaatttgcctccgatgtaaccaccgtagcgaagatggtaaactacatgagcgcactgatgagcggtgcctgtatcctgttccttttctggagcatcacccatctggtacgcaaactggtaatcaccgacgagagcaacatcacgaaaggacaacttatcactgtcatgggtagcggactggtcggcgcactggtctacaccttcagcgacaccttctggttctctgccgtagaaggcgaagtatatgctttctcctccctctttacagccattgtattctggctgattctgaaatgggaagatgtagccaaccagccccacagcgaccgctggctgatcctgatcgcttatctgaccggactgagtatcggtgttcacttgctgaacctcctctgtctgccggcaatcgtattggtgtactactacaagaaaactccgaacgccactgccaaaggctcattgctcgccctgctcggatcgggcgtactcgtagcagccgtgctttatggcatcgtgcccggtatcgttaaagttggcggctggttcgaactgctgtttgtcaatggactcggcatgtcgttcaactccggcgtcgtagtctatatcattctgcttgctgctgcccttatctggggtgtgtacgaaagctacaccgaaaagagcagactccgcatggccatctcattcattctgaccatcgccctgctgggtattccattctatggacacggcgtaagcagcatcctcatcggtgtcgtagtgatcgcaattcttggcatctaccttgctccgcaagtacaggaaaagatcaaagagaaatggcgcatctccgcccgtaccatgaatacgacattgctgtgcaccatgatgatcgtgatcggttattcctcttatgcactgatcgtaatccgttctaccgccaacacaccgatggaccagaactctccggaagatatcttcacgctgggcgaatacctcggccgtgaacaatacggaacccgtcctctcttctacggtcctgctttctcctcgaaagtggcactcgacgtgaaagacggatactgcgttccccgccagtcacagacgggaagtaaatacgtccgcaaagaaaaaacctcaccggacgaaaaggactcatacatcgaactgccgggacgtatcgaatacgaatacgcgcaaaatatgcttttcccccgtatgtacagctccgcgcactcctcactctacaagcagtgggtagacatcaaggggcatgacgtcccatacgaccaatgcggcgaaatggtgatggtgaacgtaccgaaccaatgggaaaacatcaagttcttcttctcctaccagctcaacttcatgtactggcgctactttatgtggaactttgccggacggcagaacgacattcagagcagcggagaaatagaacacggtaactggatcaccggaatcccatttatcgacaatctgctggtgggcaaccaggaattgcttccgcaggacctcaaaaacaacaaaggacacaacgtattctactgcctgccgctgctgctcggcctgatcggactcttctggcaagcataccacagccagcggggtatccagcaattctgggtggtgttcttcctgttctttatgacaggtatcgccattgtgctctaccttaaccagacacctgcgcagccgcgtgaacgtgactatgcgtatgccggttcgttctacgccttcgccatctgggtaggtatgggagtcgcaggtatcatccgtatgttacgcgattactgcaagatgaaagaagttccggctgccgctctcgcatcagtactctgtctgcttgtccccatccaaatggccggacagacatgggacgaccacgaccgtagcggacgctttgttgcccgtgacttcggtcagaactatctgatgaccttgcaggaagaaggaaatccgatcatcttcaccaatggtgacaacgatactttcccgttgtggtacaatcaggagacagaaggtttccgtaccgatgcacgtacctgtaacctcagctacctgcaaaccgactggtacatcgaccagatgaaacgtcccgcctacgactctccgtcactcccgatcacttgggaccgtgtggaatacgtcgaagggcagaacgaatacatccccatccgtccggaagtaaagaagaatatcgaccagatgtatgcacaggcagacagcgcgctcgaaaacggaaatccggaagcgatgaacgaactgaaagaacagttcggagaaaacccgtatgaactgaagaatatcctcaaatactgggttcgttcggataaggaaggactgcgcgtcatccctaccgacagcatcgtaatgaagatcgacaaagaagctgtccgccgttccggcatgaagataccagaagcgctgggcgactccatccccgaatatatgaccatcttgctgagagacgccaacggcaaccccaaacgcgccctctacaagagcgaactgatgatgctcgaaatgcttgccaacgccaactgggaacgtcccatctacatggctatcaccgtaggcagtgaaaaccacctcggcatggacaaccacttcacgcaggaaggtctggcataccgcttcactccgttcgatacggacaagctgaacagcaagatcgacagcgaaaagatgtacgacaacctgatgaacaagttcaagttcggcggcatcgagaaaccgggcatctacatcgacgaaaacgtaatgcgtatgtgctacacacaccggcgcatcttcacacagctcgtaggacaactcatcaaggaaggcaaaaaagacaaggcactcgccgcactcgactacgccgagaagatgatcccgtcatacaacgtaccgtatgactgggcaaacggcgccttccaaatggcggaagcttactaccagctgggacaaaacgaaaaagcgaacaagatcatcgacgaacttgccaacaagtctctcgaatacatgatctggtacctcagcctgactgattaccaactttccatcgccagcgaaaacttcatgtacaacgcaggattgcttgacgcggaagtacgactgatggagaaatacaaatcagaagaattggctaaacattactcggaacaactcgaccagctatacaatgagtacgttgcgagaatgaaagggaaataaaaattaggtattaagtaataagtattaagtattaaccatgcggctcattgcgcagtttaatacttaatacttaatacctaatacttattaataaagactcttatgtttatagaacaaccaccttggttcttccgagcgctgtatccacaagccatcttccggatggacccaaacgaacgggcagtctacctgacttttgacgacggccctatcccggaagttaccccttgggtactggagctactgaagaaacacgatattaaagctaccttcttcatggtaggcgacaatatccgcaaacacccggacgaataccggatggtggtagaacacggacaccgcatcggcaaccatactttcaaccacatccgcggctttgaatattccaatccggattatctggccaacaccagacgggtagacgaaattatccactcggacttgttccgcccgccacatgggcacatgggattccggcaatattacacccttcgccaccattaccgtatcatcatgtgggatctcgtaacccgcgattacagtaagcgaatgcgcccggaacaggtactgaacaacgtaaaacgctacgtacgcaacggttccatcatcaccttccacgactctctgaaatcgtggaacaacgggaatctgcaatatgctctcccccgtgccatcgagtttctgaaagcggaaggctatgtgttcaaggtattctagctgccggcaaagaaacattttacctgccgacagcaagttttctaattaccgataaggttttcatccatatccattatgaaaaagctcctctcctcagaccgaatcaaagccgaagcactacgcctcggcttttccgcctgcggactggcgcctgccgaagctgtagatgaaactgtggctaccgccttccgtcaatggctggcggacggttgccaggcagagatggcgtatatgcagaattatgaggataaacggctcgatccacgcttgttggtggaaggggcacgtacggttatcagcgtggccctaaactattatccggcgaaaaaacttcccgaaggtgagtatcagattgcatggtatgcctacgggaaagattatcacgatgtgatgaaggggaaattgaaggaactttttgagtttatagagaaagaagtttcattctccaaagaaacagacagtactatcgcctcgacaaacaatatcagcacatatactgaaaactacgcctcagccccccaagtcccagtatcccaaacctccgcttctccacttcaaggccgcatattctgtgataccgctcccatactcgaacgttattgggcatggcgtaccggcttgggatggataggaaagaatacacaactcatcattcctcacgccggctcctgcttcttcttaggggaaattattcttgatagggaagctgacaattatgactctccacaacgaaatcaatgcggttcgtgtacacgttgcctggatacctgcccgacaaaagcgctggatgctcctttcaggctcaattccgagagatgtctttcttatcttaccattgagtatcgtggggaactttcgctcaatacaggaaaaaaaatgggtaataaaatatatggctgtgacgaatgtctgaaagcttgcccttggaatcgctttgccactccttgccggacagccgaatttcaaccgtctccttctttgctaagtatgaagaaggatgattggcattcgctgagtgaagagcaatataaaaccattttcaaaggtagcgcagtgaaaagggctaagtatagtggattgatgcgtaatataaagattattaaataaatatttaaatattaagagctactaccttacgataatagctcttaggatcaattaatgcaagttcttctcataacaaacagttaaaccactatataaaaatagtatttcatgcaaaatattattcagcatattgcatcaaaatagcaggaaaatcaatagaaagtcctgcataatttgcagtagacggaactcttcccttaaataatcccattgacatatatgcatctgtaatataagctaacgcaacctgcccatcattcattaatacaggagaaagaataatttttccctgtaaatacaaaccatcatcagttttagttattattgagccgtacatcactcctccttgcccatcagacaaagcataattttgctgctgtggagtggttatagctaaagctccatcttgataggtgaccgctaaaacaatcgttgctcccaacagccttgtcattggtagctggaatatatagccattaccacccggatttttaacaatttgagtattttcctctaatgaaagaacttgattaataccaaatgctgtagcaacgactttcacaacacctgtccattgtcccaataagtcatcaatatcgtactgcaataaagcatattcaatttcacgaatgccagtagtcacttttacaatggccgaacgaattttaccagtgagattctctgttgcaataaacttaaatccatcactcgtcatttcataggataaccattgagaagcatctgctggaatagatacctgaataggcaaattactcgacatttcaacagggacctcctctgcagcatctgtcaatgtgaaataggtagcatctctattatatttccaaatagctccttcctgcagtatggttgcttgctgcgtactcacaccatcagttaaaacgatttgtgcgctacgccccggataacccgtattagcatctacagaaatggaaactttatgatctgcaacttcgattacctgacaccaatcggcattcaccgtagccgtgacagttccagttgctgcaaattcgacagttccagtgccaccactagctttcatatccaaatctgattttataattgtcaattttacagtggcagcatcgtcatctgaagaacatcctgcaacaaaaaataagcagaatattattaagtataaattcagtatatttttcataatctagttttttatttattcctcaactttcataaagaccatctctccatacatacgtgccaccccttgaacatatgaactttgactataatcaggtaccgaatagcggtcgaaggccatataatcagcttttgcaccacctactgcttcgaataccccatcatcctcaaatgtaaatccaaacggagactgttgtacatttgccacaaaaccaaacatcagacctgcctgataactaatatatgtaggataaaatcccatggcataacaatatgtagtacatcccaaataatatcctgatatataacctaccttttgagtcttaaaggacataattccttcacctctatcataatcgagcactatatcaccaattagtcccttgagaatataactcttattttctacatcctctataatagatattggtaattcttcgtctgtcaaattattatctttatacatcttgcaggtaagagtataattacctagataatcattatatttaatatatccctccggataaattcctttcattttaacgttagttgccccctcgtcagtacaagtaaaaagctcggaggaagggtcccacacaaaattttgcacagttactcctgccagtgaaactggttcccggaaacgaaagccatcggttgtaaaaaggaaaggagattgctcttgtacaatgttaccaccatcattataggctataacaaaagtataattacttcgctgcgtcataccaactaaatttccatcaaccaacaactgatattgtataaagaaagcattctcttctacgtcattcacagagtttatatatgcctcccagttcaaatcatccggaagcgcatacattactatcgtatttccatactttttgccctgcattacaattttctcggctgaagcttcttttataataaactcataatctccttgcaggttggcatttgggttggaacctccgccttgtggcttggcatatgcatgaataaaagcattataagtgtcgaatgtaagcatagtagcttcctccgatacaaccttataaagagaggaaatagtctcatcgccttcgtatccttgagatgccattgtaactcgctgaccatcaaacttgcacagaagagttatgcctcccaaagcatagtcctgacctatgtaatattccattctccaaccattagatgccgattctaatagctcactatattgcttcacttcctctgttgcacggttcgctgaagaatcatcaaaataatcctcttcctggaaaagacaggattgcaaaccaaagcatacaagagccatcaacaaataaatcattatattctttttcataatcttcctgttttattcaatagtacttaaatccagctccggaatttcttgctgacgccttaacacaatctcacgcaaatcatctaaattaataccccaagtttcaagcatataattgtatacaatagtaaacttctgattaataatagccgctccggcagttccggcaaccttcagcatattatcccagtaagcctgatcgtgagtaacatacatggcgatattctctacaaaatcttctcttgcctcactcatcgcatatgccgtcacaaatccttccggccatgcatccgcatcctctcgcaaatatgaatttccattttcagcaacatagaaataccagtcggaaccaacatattttccttcggtaatgcgatcaaacgatgggtcataattacgcttctgatgcaggatatgtgcaaattcatggtgcatcgtcttaaagtaatactcattcaaaacttcgatatcgacattctcaaagtccagactgttcacttcgtacaatgttatcttctttcctccctcggcagtacccaacaccttcgtaccactgctatcataagccggagaacctatcaagtgaaaagtttttggcacataagaccgaagaaaagccggtccggcaagttcagtatatgcctccatccatacatgcttgataatcttggccaaagcaaccgatttatcgtaatccgccggtaccagattatatttgtgatcactttcaatatcttgcatacgatacttgaaatcaacgttatacggatatgtataattagcaagcaaccattcatcaaaaccattatgttccattggctctgttgaaaaaatactatgcttggtgtcaatatcatcgccattattacaggctccccaaagaatgggcaaaacagccgttagtatataaatataatatttcttcatattatttcctccttttaattttcagtacgtggattgggttgcattcctgccagaactacactcttaggaatttgcatagcacgtcttgcgtcatttaccggcatttcatctgttacgactatattgttattagcaatagaacggcgatagataacaattccataacgtttaatatccggccagcgcagaccttcgtgcaaagtagcaatacgtctcatatgcagaatgcagtgaataaagttctcctgtatacctgattcaatagtaaaatcaggctgaagctttttcttgggagtcggattttgtgtcggattgtaataatccatcttatcataatactcatttatcatccccggagttaaagtttgcttattagaagtatatgctttctcccatgtagtaagatctgcagcagccattggatagttctttttcagcgtataagcctcagccctgcaaagcaaagtctcgtctgtagagaaaatcacaggcatataatacaggtagtcaccagcataataaccgccctttctcaacatactgcattcatagcccgatgttgtaaaaggctgcatatacatgcggtcagggataccccataatccggaagaacgtgatgtttcgtaagaagcaattaacttattatgtagataacgttttcctgtcatgtaattactcagaataataccccagttagatacggtactacctatcaacaagttagccttacttgtagaagcaatatatgcgtcgggctgtacattatcattagcagagagttttcccaacgcttcccaatcccgtaattcggcagcaggatcacttcccaacacacgatctgcatattttatcacctcatcacaattagaaaagtcaggcttcatataataaagatagaaacgtgcagcaaaagcatatgcagctttccttgtgaaatgatatttcggcacagaataactatcatcggaaataagagccataccatctaataagtccttctcaatcttctcataagtctcctgcaaagtaccccgcccgtattgtggttgcacagttgtttcaactttagtcatataaggaatacctaattcctgtgatgcatgagtattataagcattacaaaaaatatttgctaatacaaaatgattgtacgcccgacaaacaagagcctctcctcgctgcggcatcaacgattccggatttccccgtttctcaatctcttccaaagccatgttagcagaagcaatagctatataatgggtttcccaaagatttgtaggcgtatcctgatattcttcctgggtatctttccagttatagcactcttcctcagataacttataataagaatatctggcactgttatcgtcggtattatcactataaagttcaaacagttcattcgcagatccttccggataagcagaaacaagcattttagctattttttgctcagaattcagctccgtccggttatctggtaattcgtcaagaaaatcattacaagagctaccgacaatagcaagcgttgcgatgaacaatggaatatataattgatttcgtctcatctttaatctttttttttattattaaaatcattctcttacaatcctaaacgcagagttaatgtaaactgacgtggcaccggtgaagctacaccaccagtattaaagaattcaggatcttgaccattcaatttcttatctgcataaataaggaataaattagttgcctgtaacttcaaagaaagattggaaatcttcgcagcagaaatccagctcttaggaaactcataagaaagtgagatttctttcatacggataaaatcaccttttgcaattcgctctgtagaataattgtaagcattgtaagctttatacaatgttcggtttgcttcatattgcggattactcaagattgcaggaatattagtctttgcctcatccccagaaagcgtccaacgattcttgaattcacgaggcatagcactcaaatcggaatatttataattaaaatatggattcaaacgaacaacattaccaaatgaataagtcatgaatacattgagtttaaaccctttatatgcaaaaacgttaccgaaactaccagttattgtaggatctgtcggaccttcatatttcaaataatctaacttctcacgttcctggaaattaatatcagtcgatgttatatttccattgatatcgaacataggaatacctttttcatccaaacctgcaaaaggaatggagaaaagcccgcgcacaggatatccttcacgtgcaaatccatttcccgaaacaagttccatcatacgagtacgtcctcgcaaatcagtaacttcattcttagcatgagaaaaaataaaatcagaattccatgagaagtctttcgttttaatattgctggttgaaagggtaaattcaataccatgtgacttcattgtagctacattggcatatttataaatagtacctcccactccttgtgttggaatcaacccaatcaggtcatagttattgcgcgtgtaccagtcagctgaaagattaatgcgattattaataaaacctacatccactcctatattcaattcatgcttcttttcatacgttaattcactattttccaaatccactatatgaagacccgtttcttgaatatcagtgaaaggacgataaggtgaataactcttaataatagcttgtgaatttgttacatcagccggaccacgatcagctgtcaatgagtaagatgccttaaatgtcaaatttgaaagcgttggttgaagtgattggaagaatttctcttcatgaacattccacgctgcagaaagattccacgttggcagccaacgagcagaacggctacgccccattctattagttccttcatagcggaaagtaccattcagcgtataacgtccgtcatacgaataagtagcatttgcaaatgtagctacactccgatatctagtatgccccatagaataatacttttctccagtctcaatacctttcttaaaatactgataaacatatgatggaatctcacccatagaatattgcataccccatccttggaatgaagagttagagcgttgaagatcatttacttccattcctgcaaaaagattagttatatgcttttctgcaaatagatgattccaggatacagtaccacggaaatccagtcccaacatcttacgatcttgacgctgataaatacctccttcaggaagaatcgaaataggtaatgcatatgggttatctggattcttatacaaccagtcgttttcatcacgaatagtagcatcgtccaatcccgtacgataagcaattgcttgattagaatcatccattatattatgttcttgtgatgatgattgataacgcacagcacccagcgcactgacttccaggccctgcaacaccttccatttcaactccccctggaactttacatcaacaacattcaactcaataaaattattgtccaattcacggagaatattaaatggagcataattagccacataatctgtattagggtctaatgtacgcgaagtattcagtgcgtatgaataggggttgatatcaaaatcacgtgtaacctgacctgccgcaacgtccaatgatgagttcatggtacctggtgcattctgtttacggtaagaagcacttgatatcaaatttatgcttaggttctttaagatattataagtcgtattcaaattggctgtataacgtttcacttcactctgcttataccatcccggatcaagcatggcactcaatgacgcataaaaagatgatttatcagaacctgaagtaatacttacagagtgattctgtgaaatattatttgagaataatacatcaaaccagtcggtattacgcatttcggcttcggtcaaataagcattacgtgcttctaaagtattcatcagcccaaattgaccattcgtttcattaaactggtcgatcagtttatacatacgtccgtacacacctgaattctttgcacgaaataaatcagcactattcaaccaacctttttgctccaattctttatatattcccatttgctcctgagaattcataatattgaactctttgtatgagggcaccatacgcgtagtaaactcacccgtataattaattttgctgactccggctttacctttctttgtagtaacaacgattacacctgccattgcacgtgcaccatagattgaggttgctgaaccgtctttcaaaatctgaaagctctcaatatcatcggaatttaaaccagcaatagccgaactaatcagagtttcagcatcacctgaagataaatcatcaggtcccacatcaatagcatcttccataataactccatccaccacccataatggtttggagctaccataaatggaagtagcaccacgtacacgaattttaggagcagtaccaaacgtaccggatacgttctggactgacacacccgcagcacggccttcaagtccacggctaatatcagggagaccatccaattttacattatcagctgttaattgttgagttgcaccagtaaaaaggcgtttgtccattttttgcatgccggttaccactacttcctccagaacttctgcatctggtttcatcagaattcttatcgttcctgcttttatagggacctcctgagttttcaatccgatatagctaatcttcaaagttctagcagaacttggtacatcgtttatggtaaacttaccatcgatatcggtgactgttcccatcgttgtacctttcactaatacggatgctcccacaacaggctgatcatcttcttcagaaatgacgacacctgtcacctttttaggtgtttgggcaatcactagacctatgcttgccagcaagcaggccaataacagcattaattttcttttcataaacactctttattattataagaattagtaagtcgcttattttcgcttagtgctattttgcaaatataagcacatatttataaatacaaaacaattattcaaaataaatttgaaaactattgtaaatacattatgatagttatgaagataaatacatatcatcaaactatcataatgtcatatttctgtcagcatatgcaaatttagccttgtttaaataatcattatgtcatctaaacactccctttttatctttaactaagccttgaataatataaaatttatattagatataaataattagtatgaaaataggttataggagaatatgatacaattatgtgttacgtaaaaaagagaaaataaaataagttctgctagaactttgaaaattagctacattggaatgaaaactcaggagattcctatcaaaacaggaacaataagaattctgatgaaaccagatgcagaagttctggaggaagtagtggtaaccggtatgcaaaaaatggacaagcgccttttcacgggagctgcaacaaaacttgatgcagaaggcgtaaaacttaatggcatggcagatatcagccgtggtcttgaagggcgtgctgcgggtgtgtcagtccagaatgtatccggtacatttggtacagctcccaaaatccgcgttcgcggtgctacctccatttacggtagttccaaaccattatgggtagtggatggagttattatggaagacgctgtagaagtcagcgctgatcaactatcttcaggcgatgctgaaactctgattagttcggctattgccggtctgaacgcagatgatattgaaagctttcagattttgaaagacggctcagcaacctcaatctatggtgcacgtgcaatggcaggtgtaatcgttgttactacaaagaaaggtaaagccggagtcagtagaataagctataccggtgaatttactacccgtttagtaccaagctacaatgactttaacatcatgaactcgcaagatcagatgggagtatacaaagaaatgcaacagaaaggctggttaaatttcgctgaaacctcccgaactgcagaaagtggtgtatacggaaagatgtatcagttaattaacacatacgatcctactaccggacaatatgcgttattaaatactgacgaagctaaaaatgcctatctacgtgaagctgaaatgagaaataccgattggtttgacacacttttctctcccagtctaagtcagaatcattctgtaagtcttagctctggtacagaaaagtcatcgttctatgcttctttaagtgctatgcacgatccgggatggtacaagcaaagtggagttgatcgctatacagccaacttaaatatgaatcataatatcttaaagaacctaagcataaacttgatatcaagtgcttcttatcgtaagcaaaaagcaccgggaactttaggacaagacattgacctagtaaacggtcaggtaaaacgtgaatttgacatcaacccctattcatatgcattgaatacttcacgtacattagacccaaacacttattacaccagcaactatgctgatttcaacattctgaacgaattggacaacaattacatggaactgaacattgcagatttaaagttccaaggcgagttgaaatggaaaccaattaccggattagagctaagcgctttgggagccgtgaagtatcaatcaacttcacaggagcacaacattaaagaccagtcaaaccaggcatcggcttatcgtgcaggtctagatgacaagacaattatggaccgcaatccatttctttataagaacccagataatccatatgcactaccgatctctatcttaccggaaggtggtatttatcaacgtagagactataagatgctaggttacgacttccgagctacagctagttggaaccacgtatttaatgatatacatatcactaacttctttgcaggaacagaaatcaactctacagaccgatcaaagaattactatcaagggtggggtatgcaatactcaatgggcgaaataccctactatgtatatgaattcttcaaaaaaggtatcgaagacggcaataattactactcattgagtcagacccgtagccgtagtgccgccttcttcgccaatgctacctactcttataaaggtcgttatactgtgaatggaacagcccgctacgaaggtaccaaccgtatgggtaagagccgctcggcacgttggttacctacatggaacgtatcaggagcatggaatgcccatgaagaaaaattcttcagcaatttaacttctgttctttcacactttacactgaaagcatcttattcgttaacagccgaccgcggtccggcagacgtaacgaactcacaggctattataaccagctatagtccttatcgaccatttacttctatccaggagtccggattgtatattaaggaactagaaaatagcgaattaacttatgaaaagaagcacgagttgaatattggtgccgacatgggcttcttgaataaccgcattaatttagctgtagactggtacaaacgtaacaactacgacttgattggtatcgttaatacacaaggcgcaggtggacagatcctgaagtatgcaaatatcgcttcaatgaaatcacatggtattgaattcactttatcaactaagaatattaaaacaaaagatttcaactggaacaccgactttatattctctaatgcaaaaaatgaagtcactgatttgaaacaaaatgcgaatgtgatggagcttatttccggtaatggattcgctaaacaaggctatccggttcgtgggctattctctatcccatttgtaggtctcgacaaagatggtattccagtcattataaatgaaaagggcgaagcgactagtaccgatataaatttccaggaacgccaaaatactggtttcctgaagtatgaaggtccgactgatcctaccattacaggtagtttgggtaatatgttctcatacaaaggtttccgtttgaatttatttatcacttattcatttggaaatgttatccgtttaaatcccgtattcaaagcatattattcggatctaacggcaatgactcgtgaatttaaaaatcgatggacactccccggagacgaagcaaagactaatgttcctgctattttgagcaaacgtatgtacgacagcaatgaagacttgaagtatgcctacaatgcttacaattattcaacagaacgcattgcaaagggggattttatccgtctgaaagaaatctcactggcttatgacttccccaaagcatggatcaacccattgaagttaacagacctctcgctgaaagtccaagccaccaaccttttcttaatctatgcggatgataagctaaatggtcaggacccggaattctttaatgcaggtggtgttgcctcaccggttccccgccaatttactattactttaagactggggttataatttaaaataagaacgaatatgaagaaatacataataatggccagtgtggccgcgctcgcaatagggctctcatcgtgttctaatttcttagatgagcttcccgacaatcgtaccgagctgaatgaaaacaatgttggcaaaatattactttccgcctatcctactacagcaatctgtgagatgggggaaatgtcatcagacaatactgatgcttatccgaatcgcttttcttctttcaaccgtttgcaagaagatctctataagtgggcagactctgcagaacaagatcaggactctccccatgcactttgggaatcttgctatatggcaatctctgcctgcaacgaggttttgaaagtgattgaagacgcaggaaatccagcttctcttagcgctgaaaagggagaagccctagtatgtcgcgcctatgctcattttttacttgccaatatattttgtaacgcttatagcagccaagcaagttcagacttgggtatcccctacatgaaaacgatagagacaaccgtaagccctgattatcaacgcggaactctagaggaggtataccaaaatattgagaaagatctattggaaggtctagatctagttactgatatttatgcagtccccaaatatcactttacaaagaaagcagctcaagcttttgctgcacgcttttacttgtactatgtaaaatcggataaatccaattatactaaggtgatcgattacgcaacaaaagtattaggaagcaatccagccacctctgtacgcgactggaaatctttgggtgcactagacataaatggcagtgttcagccaaatgcttatgtagatgcaacgaatggcgctaacttattattggtcagtgcaggttcttattggggatatgttcatgcaccttatggactaggcgaaagatacgcccatggaccgaaagtaggcaatgagacatgcaattctgttggtccttggggaagtgactattacatgggtgtttggagcaactcaagtgcactgccgaccaaaatcgttgttatgaaaataactcaatataaagaagtggttgacgcagtagccggaacaatcaacggacacatgatcaatgcagcatttactacagatgaaacattactctgtcgtgcagaagcttatgcgatgaaagaaatgtatccacaggcaattgctgatttaaatatatggcgagaagcatacacacgttctactaccccgcttaccacagaatctataaacgatttctacggaagcatggaatattacactcctactgaatctacagttaagaaaaaattgaatcccgactttactataacaaatgaaacacaggaaaatgtaatccactgcatacttcatgcacgacgtttaacaactttacatgaagggttacgctggcaggatattaaacgctacggtattactatctatcgtcgtttaatgaatgataatggtactattaccgtcacagataagctggaacccaatgatcctcgtcgagcaatacagataccgagcgatgttatttcagccggattaaaaccaaaccctagaactaaataaaaatcgataagttatgaaaaaatatataatatatacattgatcgttactatagccgtttttttaggctcatgtaataaagatgatattgataccaaacgcagtatatttgatcctactgaagtttatgagcccaacgagtttgacaaatggctacttgacaactatgtttacacttataatatccaggtaaaatatcgtctggatgacaatgaaacggatgtagaatatcatctggttccagccaagtatgacaacgcaattacattggctaagattgtaaaatttgtatggatggaagcttatgacgaaatatggggaattgacatgacccgtacgtatgtccctaagctactccagttcattggaaatgttgcttataccgagtcaggtatgatcctcggacaagctgaaggaggaatgaaagtaaccctgtttcgtgtaaatgaaatagataaaaacaatctcagtgtagctcaattaaatgagtactatttcaagacaatgcatcatgaatttacacatattcttaatcagaaaaaagcctatgatacatcatacgatcgtatatcggaatccgactacgtaggttcaagctggtatagggtatctgagtcggttgctctgcaaaaaggatttatctctccttatgcaatggaccgtgctacggaagattttgcggagatggttgctatttatgtcaccaatgacgctagtacttgggaagatatgctagcaagtgccggcacaacaggaagaccgatcatagaaaagaaatttgagattgtatttgattacatgctcaattcctggggacttgatttagacaaattgcgcgaaattgttttgcgccggcaaagtgaaattaccgaattagatttaagtacgctttaataattgtaggatatgagaaagattaaaatatatggcttactgacttgcgtttgcctgatgatgcaatcgtgtctgtttaatgaagatgatatctttgatgaatcttctgcacaacgggctatagcctccgtcaacgaatgtcaggagattttaaagggcgcagccaatgggtggttactcgagtattatacaggagaagacggagaatatggtggcttcaatgttttggcacgatttgatggcaataatgtaattatggctgcagatttcgctacagataattacgaaattggagaagaatctacttccttgtataaagttgaatcataccagggaacagaattaagttttgattcatacaatgaattaattcacgaattctgtgaaccgagtggttataattcaccaggatatgccggagattatgagttcgtcttcagaagcgtttcaaaagaaaagatcgtactgactgggaaaaaacatggagtaacgttgatcatgacacctctgcctgctgaaacaaattggcaagagaaactgaccaatattgccaatgtcgtttcacaggcttcatatgtaacctataagttaattgtgaatggtcaggaaataactaaaatgggacaggaagagcatgccttctcagttaccaaagtagacgaaaccggtgaaacaaccgtaagtctatatccgttcatatatacagaggaaggcattaaaatgtatgaaccattagtagttaatggagtagaaataaacaacttcaaatgggataatgaaaaccttacatatatttgtacagatacaggtgtagatgcaaaaatagaattctattgtccggaaggatatctcaactatttaggcaactatatactacaattagcaaatgggcaacgtatacaacttgagctcaaacaaaaaatgataggaaaatcatttgcaatgaattttgctttgagtggtactcctattgaatttgtctataactataatatgacaacagactgtattgatgtaccttctcagacagttggcgtatatcaaggttacaacgtattattatatccaggaattcccggaggcaatttctatgcagatgactcagctgtattccaaggacgtattgcaaatacagatccgcttacaattaagttcacttatgtaaacaatcctatttgcacccttatgttgctggtatatcaaaaaacagacggttggtatggattctctacaatgttccaagatgtaacattgataaaagttgattaattaacaaatagcatattatgaagaaaataacaagcatatttgcattattattatgcgtattcgtcttctcatgtagtaacgacgacgataaagaaacatcttctttgcagattgttagctcaaatgtcacatttgaatctgctggaggaaccggtacaataaaagttaacgcaataagtgaaattactgctacctccaataaagattggtgtaccgtaagcgtgaatggagatattataaatgtttctgtcattgaaaataatgatatgtccggacgtacggcagctgtaaccataacagatggtgaagcatccactttggttcctgtttcacagggtggctgtgttattctgtataataaatcagaattggggcatgcttttacttatgcaggtggttctgctacagtatctttctcaaccacagcatcttattcaatagaagtacccgccgaagcccaaagttggttatcatacacacttgacgaagaaaacagaactataacatttaatgttgctgcgagtgctgataaaaccccacgaggagcggcagttaaagttaccgcaggtaaaaaaacgatttactatcatcttggagagtatgaattgaaagacatcgcaggcaaatggagagtatcctttgttgatggagatgatagtactctagctggagaaatagaagtagttcaggatgaagaggaacctaccatcttctacttgtcaggtatttccaatttctttgacctaccgttaatctataatggagaggccttactcacaatgggaggtcttaatttaggaacatatgctgggagatataacatctatacagtaacattgtctgaaggtggatatgtcagttgggatatgtcaacacaatatgttgcttatccgtcatccatcaatggcaaatttgcattggtatttggtgataatggttcctgggatggagacgtagtcaatggcattgcctactgggcattctccggtgctgcgggaacaggaagtgcaggatggttggagaaattcaacgctcttacactaagcaaataagacggcaagcttgcttagctaagtctgtctctctaacatgtataagatttagctttacattaattattcatataaagggtgttcaacattggacaccctttacattatccttttccatataaaaagcaatacaaaagatgatgttattattaaattaattcgtatctttcggacacacaaaaaagttaaaccaacaatcacacatatgaaaatgattcttttccgactaatatgtttaaagacatgcctactattaatccctgtactttacgcacaaaacaactatcgtccgggatttatcatcactgttcagaaagacacaatatatggagaaatcgactaccgtacagataagatgaatgctaaacgctgcgtctttcaatcacaaggtaatgataccgaaccagtaacctatcatcctttcgaaatcttgggataccgttttacagacgacggtaaatactatgtctccaagaacatagaattgaaatacggtgtctctacccccgtctttctcgaatatttgctacaaggaatgaaaagcttgtactactatgagacagaagataacataccaatctattttgttgaagataataatacccttgtaaaaatagatgcgcccaaactgtccaagcaggctaccaatatacagtttaaaggccagactgaccgatatattccccttcttcattacgcattcaaagactgcccaagcctggctccccaaatagaccgggctcgtttcagccgaaaggagatgataaaaatcacaaaagaatatcattatgcaatgtgtaccagtaatgaagattgcattgaatttgaagcaaaagaagataaacgttcaatacagttagatataactccttatgtaggagttattcaatataatgtaccatcgggtagtccgatcgggctctatagctcacccgaactatcttacctggcaggagtcactttagctatcagcaatagacggtggatgagttcgctcagtggttgttttgatgtgtctttttcccgcataacatcctctgcaagatcattgaataatgaaaattcatccactatatttaaacatagcggaacaatgttttcgggtaagttaggaatacgctatacctatccgaaaggaatggcgcgaccatttgttgagcttggagcagacttcagtggaatgatcaatgccaagataaagataaatgataagagcgagagatggctggatggtgtctaccctggctattacgccaatgcgggagtaaacttcaaactttcgcggaaaaacaaacaaatgatatgcatacgcgctcaattcaaaggcttaagagacatgatggaaaaatcagccctcgttaatggatggtcaggagtgataggatatacattttaagtactgcattattcgtttatatagtactcacactaggaaatctcttataaaaccgtttttcttgttatacccatattctacccgacaataaaactccccttatttcagcctttcgaatgaaataaggagagccttatataactgggttatcagctattaatacttgacttctcaggtattaataactgacgcgacaagtattaatacctgagaagtcagatattaagacctgtcgtgacatattagaacgtttgtaccagagtttattaactaccgtcttagtaagtcactgtcaacggtgtacgcaccttctgcgcatactcagccatatacgcattccacgcatcaaccgtcttgatagcagccttatcccaggcagagccccagtaataagtatattccgagcccggttcatactcgctgattgccagtacatgaccgtcagctccaccgcgcagctccttcttctccttttccgggaaaagagcggtctttgcttcttttaccaatgaaggaaatgcagcgccgataaatatcttaccgttacccccgcttctgtcggttgtagggtctacataggtgatatagccgtttgcagcgtctgctgtaaccacaccgtccggttcacgaagaacgattccggtagtcacaggcatcgcttctttcaggttagtatacgaaacaacggttttattcaggtaagaaccagcatccaatgtgatgacacgcgtttccaccacgttagaatcgccacgaacagtcaacggattaaattccagcttcactgtgaaacgcagcgggccattatcaaggatttcctgtgtccgatagcaataaggatagataatcgtatcacccgccatcagagcggctgtaccgcagcccagcgtaggacctacggcataacaatccattccgtagccgtggtcaatgtgataagagatggcattttgcagttcggcagccgctttagggtctgtctttttcagttcggcaattctggcacgcttttccttatccagttcttcagcgtaaaggctttcaagaatcggttccgtagcgttatacttcgtaaagaggtcgtagccgaaaccacgttcaccacgcttctgcaaggcagggccataggcacggtatccgcccaggtcattctcccatgccacatcgtccaaacgttcaggataatagcggccgcaggcaattacattatacgggtcgggagtaccggattggatagtataagtggctgtgccatttgctttcaccgtagccgggaaaaccactttctcgtcatacgtcacttgataaggtacttgctgaccatcttcaccaagcactacgatctgagccgtatcagccagctgcagcttggctgtaacgtcactcatcggaacctcaaccatttcacctgtgcgctccagcgccagaggattggttactgtaaccgtcattgactgcttgctgtcagcacaagaggcaaaacccatcagggcaatagcagccagaataaatatcttcttcatattatacacaacaaataaggggatagaatcaggtaaaaaaacgaaaggggataaatataaaccgtaaactattcaacagaaaaacgataaggtgacaggcggtaaagaatctccttaccaccctatcaccttataataatctcttgttatcgttatttcggctgttttccgatataagccaggataccaccgtctacgtaaagaacatggccgttaacagcgttagaagcctcagaagccaggaatacggcaggaccagtcagttcttccggatccaaccaacgaccggcaggagtcttggcgcagatgaatgaatcgaacgggtgacggcttccgtctgcttgtttctcacgaagaggagcagtttgcggagtagcgatataacccgggccgatgccgttacactgaatgttgtattcaccatattcagagcagatattgcgagtcagcatcttcagaccacctttggcagcagcgtaagccgatacagtttcacgacccagctcagacatcatagagcagatgttgatgattttaccggcacgcttcttcatcatggcaggcaacacagccttagaaacgatgaacggagcgttcaagtcgatatcaatcacacgacggaagtcagcagcttccatttcgtgcataggaacacggcggataataccggcgttattaacaaggatatcaatcgtacctacttctttctcgatagtagcaaccattgcctgaacagccggttcgtctgttacgtcgcatacataaccgtgagctttaattcccttttcagcataggcagccatgcctttgtctaccaactcctggttgatgtcgttaaaacatacagtagcgccttgttccgcgtaagcagaagcaattgcaaaaccgataccgtaagaagcacctgtaacgagagctactttacctttcaaagaaaaattcaaatactgattcataattttttgttattaaatgatgaaaactattgtagttgtttattttaaatctgtaattaatgagaagtcctgatcgccataatcgaggttttcaccgcccataccccagataaaggtatagttgtgggtagccgcagccgagtggatcgaccattcgggagacagaaccgcctgatcgcccttcatccatacgtgacgagtttcgtccacctcacccataaagtggcagatagcgtgctcttcggggatttcgaagtagaagtaagcctccatacgacggctgtgcacgtgggcaggcatcgtgttccatacgcttcccggagcaagttccgtcatacccatctgcagctggcaggtaggcaatacctgattgaccagcatcttattgatgttacggtggttggaaccttccaacgagcccatttcagccactacggcatccgctttcgtcactttacggtcgggatagttgcggtgtgcggtcagtgagttgaaatagaatttggcaggattggaagcgtctttgctttcgaacgtcaccacacggtcgcccgaaccaaggtagagggcttctttatagtcaagttcgaaaaccgcatctccggccttcactacgcccggtccgcctacattgtaaatacccatttcacgacgggtcaggaagaacggagccttcagcgggtcgatcgcttcgagtgtcagcacctctcctaccggaagcgcgccgcctacaaccatacggtcgtacatggagtacaccatattcacttcgttggaaacaaatattttttcgattaagaaatcgcgacggattcttgcagtatcataactttttgcatcctcgggatgcgcagcatagcgaatttcatagttcgttttcataccttatttatttatagttattgaataagctctctttctcaaatgcacatcgtttacgtacacgatgcaaaaatagtaaaagaaaacgggttaaccttgcaattttgttccaattatccaccaaaaatgtccagaattgatgcaatgtacatctttttaacgaactataatacgttttgaaggagtttgacgactattttcaatgatacaaaacgatataaaaaaaggaagctccaataatcaatgattatcagagcttccttttggttgtcctaccaagattcgaacttagacaaacagaaccaaaaactgttgtgctaccattacaccataggacaaacatatgcgctttctgttaaaaagcggtgcaaagatagaggtttgcaagcaaacctccaaatatttcgattacttttttactttgccaccttgcaaatcgctgatttttacttcgcgatcagcagaaaatagttctttttaccacgctgaacaagcagatatttcccgtcaagcagatcggcagtcgtaataacctggtcaaaagcttccagtttttctttattcaatgatacgccaccgccttgaaccaacttacgcatttcgcctttcgaagcaaatacagccgcattatcgacaaacagatcaacagccttcactccttccgccaaggcgtcacgagagatttcaaactggggtacgccttcgaatacagccagcaacgtatcttcgtccaacttacgcaacgactcggaagtagcgttaccgaacaggatattagacgcatctaccgctgcattgtaatcttcttcggagtgaaccatgatagtcacttccttggccagacgtttctgcaaagcacgcaagtgcggagcctgctggtgctcggccactaatgcttcgatttcttccttctcgatcgaagtgaaaatcttgatatagcgttctgcatcagagtcgcttacgttcagccagaactggtagaacttatagggagaagtataacgagggtccagccagatatttccagattcagttttaccaaacttaccaccgtcagcttttgtgatcagcgggcaagtcagcgcgaacacctctcccccattagtacggcggatcagttctgctccggtagtgatatttccccactggtcggaaccgcccatctgaagtttacatcctttagtttcatacagatgaaggaaatcgtagccttgaagcagctgataagtaaattcggtgaatgacagtccgtcacgtgcttctccgttgaggcgacgctttacagaatcctttgccatcatatagtttacagtgatatgcttacctacttcgcgaacaaagtcaaggaaagaaaactctttcatccagtcataattgttcactaattcagcacggttaggcacatccgactcgaagtcgaggaacttggcaagctgttttttgatacacgcctgattgtgacgcaatgtttcctcgttcagcaggttacgttctgccgattttccggaagggtctccaatcatacctgtagcgccaccgatgagtgccagcggcttatggccgcagcgttgtaaatgacgaaggatcatcactccacaaaggtgaccaatgtgtagcgaatcggcagtcgggtcgatacccaaataggcagtcacctgctctttgtttaacaactcttccgttcccggcatgatgtcctgcagcatgccacgccatctcaattcttctacaaaattcatcgtattactctttttattaggtttttattgtctttcaattccatgtgcgacaaaagtacgactctttctcggaagatacaactcttaacgcctaaaaaagactttttgaatattttcccgaatcgcctgccgcagctcttccgcatccgtgcttcgtgctttcgccacctgcttcagcacttcttcaatgtcgaccggactgtcatccgtctccagaaacaggcgaccgacaggcactcccttcaccgtttcctccgaataatgcgcaccgaaagaaagataaatgccgttctttatcagttgccctgcctgctgcggtttcccgcgaaagccgtgccaaatccagggttgagccggattcagtttcttcctcaccgccagcaactcatccatcgccttcacacaatgaataatcagtggcaaccgatatttctccgacaattccacctgcttctcaaacatccttacctgaagctccatcggagcagctgtcagtttatcgaaacccgcctctcctaccgccacaaactgctctttcacaagcaactgctgcagaagttcaaattgctcttccgcattgcgttccgtcagtttccagggatgaatgccggccgaatagaaatatccctctttacctgccgtcctgacatccgaagccgacaggcacagcgaatcatccaccggtaatggaaaattgataatcgccctgccgtgggaagcatcctccgacttgtgagtatgaatatccagaatatgactcgcgttattctccatatctctcgttctttagggtaaatcgtttttaaggcacaggatcataaccggaaccaccccacggatgacacctgagaatgcgccggacagccagatagagtcctttgacgggaccgtgtttcttgattgcttcgaccgcataggccgaacaagtgggcgtaaaccgacaagacggaggggtaaggggcgaaatacacacccggtaaaaatagataggaatcagcagtaagaatgaaaacaccttcctcacaagacttttcagggacatccagcagacggacacccggtgagcacggggtttcataaggataacttttcagaaatgcgcgaaagcgctgtcttcattttctcttccagttcggcagtggctacaagttcgtccgacagatagataaaagcaattgccagacgctgccctttgttttgcaaaccgtccagcagtggctgtttgttcttccggtagacttcgcgtatctgccgcttcacccgattgcgctttacagcacgtttgaaacgccgcttcgatacgctgataagtatcgttgccggcacttcaccttgttctacgggcatatatacaacgcgtatcggaaagatggaaaacgacttggaatggccgccttcgaacatctttccgatcaatattttactattcagcctttcggctttacgcaaagtatatacgctcacgctgtttatttattgttttccttgatgaacatatcaagcgcagccgtcattgacggagcctgcacagtcggtgcttcaaggtccaaacggagtccggcgtcgcgtacagcctgcgcggtagtcgacccgaaggtaccgattctgatctctttctggtcaaagtccgggaagttcttcttcaaagaagtcactccggcagggctgaagaacacgagcatgtcataatcaaattcctcatccgatgtaaagtcattgctcacagtgcgatacattacagcttctgtatgctgtatgttattcttgtcgagcaggtttttcacatcatcattgtgcacgtccgacatagggacgagatatttctccgttttatgctttacgatagatggcaccaaatcttcaatctttccggtagcaccgaagaagattttacgtttgcgatattgcacatacttctgaatgtacaatgcaaccgcttctgtgacacagaaatacttcattgtttccggaatagtcacacgcagctccgtacacagattaaagaagtgatcgattgcgtggcgtgaagtgaatataacagcagtgtgatcaagaattgaaaccttctgttgccggaattctttcgccgaaagactctcgacctttataaacggccggaaatctatttttacgccatatttctctgctatgtcgtaatagggagatttctctgacgcaggcttaggctgcgaaactagtacttttttaattttcaacgtcctaaatttttattagcaatacattgtttacctggatcattccctgatagagtagcagacagggtatgatttcaagagcgcaaaagtacaaaattaataggaaagccgcacttaattgatgaaaaaaaagctttacccacttataaaacatcaatattttagtaaaaattagaataattagtccgattatcactaaattggtcaggttcagatcgaaataaacaaggaatagaacaaaaggaaaaagggcgaatccgacgtaatatatgagcgtagaataagattccaaccatatatttgtcttgtttttgtcaaaaaacacccatccgaggaacatataaagtaaccatttcagtaaaaaataggcaagacagaagccgacataaatccccaatagcaggagaggggagaccttggtcatcagcatcggacatgtatcatgaaaataattgaagaacacgatacctgtcaatacacaggtctgcactaccagtacgagtagatagcgcacatcggctgccgtagaactatcaaaaatgcttgtccgctcgcgatgcaatacaaagtctttcacctgttgggtgagaaacttctttccacgagccagagcgatggaggaaagaaagaagcaggcaagcaatgtcaaggcaatcacatcatccgtacggggagagtaggagatagggattccctcgaatccggagttcagaatatcggctatcatatggctgcaaatttacggatagaagcgtcccatacgggagttgtctgaagtaactccaccgcttcttccggtgtttgtgccactttccatatatcaccgtgttgctggcgcatgaagttttcctctattgcccgttcgagcatttggaacagcggatcaaaaaagccgtttatattcagaatgataatcggattcagatacagtccgagctgtttccatgtgatgatttcaagcaattcttccagagtgccgcatccgcccggcaaggcaatgatgccgtcgctcagattcgccatcttctgcttgcgttcgtgcatggaagtgacttcgatcaattccgtcaaccctgtgtgatgccagttctgttcgaccatgaagtgggggataacacctgtcacctcaccgccattcttcagaactgcgtcggctacggagcgcatcagtccgatgcttccggcaccgtttatcagacggatatgttgtttggcaagcaggcggccgagtttttcggctgcttcaaaatatacgggggctatcttagtgctggatgcgctgtatacgcatacggaatgtatctgattcattgtcttttgcaagtttactggatgaatgggtacaaaagtacaaagaaatcatatacatatcaaaatgaatgtgcaatttatgtcaaagtgaagatagaagaataaacacaaaggcaagactgcatattctatttctataaatagcacagtcaagcctatattctcctacttcaacactcattatttaaatattggcataaaaacagaaaattgaatatttcgtgaagttacttttccaacaccactagtattcatcagattgcaagtaccttgtttataagatagttgtagttcaagccatttcagcgtataactaactcttgccacaataggtatatcgatcgcattttttttgctattataagtagatgcacccaatcgatttacataccaagccacatctgctccgactccaagtctaaaattagaaaaacattcataactgaacacagtccctattgatagatattttccgtttacactatacttaggactatccgaattgaaggcttgataatcagtcccctgcgagccaaaaagagcaatgccatccattgcaaatttacgattaccccaatactgccgataagcatatccaatatgataatgaagtttatatccctcaaaattactggaaaccacactcactttttcatgcaatgttcctaaagagcctcctaaaacaggaccatgttcctgtgcagataatgatgctgtaacaaatagcaaagctataaatattaaattagtaattgttttcattagaagttcagtttttattatttaatatacaaatgatgaggacaaaagagtttatggttgttgctactttcgtcctcatttacacttttataatctcacagtggcaaatcctctttggtcatacggcacaccccgagaccagatttctattgtacccgtacactcttgtgctaacttacgtccaaaaactttggttacatttccacccatttctttggtatcaatagcaaaaggaataccatctttatttacatacactggaccataccccagtagttctccttgagcaaactcaaaaccacgaaggtttactttagcatggtatgtcgtagagtaacggctccatccaaagactcctttcttttgcgaagtaaaattagcatgtattattcctgatgaaacagataaatataatcctacttttctatctttttgacgactatatgcttcgtttatagaacttaaatctgaaacagacgaacgagtagaaaccgtaaattgttgttgacgctctttaaagtcagtatataccttatccacaaccaaagaatcgccaatcataaattcacctttcatattaacaaagtattcattggctacataaacaagccttgaataaggtgacagatcagtagcatcgatagtattaaacataaatacatcaccatatttatgtttatatttctcatatagaacatcaaactccgctttatcagcagcttgattacagattttatccaactcaccatccgcttcttgcatcagaatcatctgagacttaaaagataatgaattaagaaaactaacttgttctgaagtagacattgcactcactttcaaaagagcattctcgtacgattccacatctttaaatttaatcatagtaccgtcgtttattacttctatttcagaattagcattcgtcggtttaaccatattcacttcctgttcatcattggtacaagaaataaatgcacctaaacatactgttagtgtcagtgttgaaaatagttttttcattgttttttcttttttagttaatatcaattcgtagttgcaactatctttatgctattttttatgactcaattatttaatagctttttctatccttcaataatcctgtactcaaaatccccttaccaaaactttgaccagattatctgctacaaaagtagagataatggaggtatcgacctagatattcaattcagtaataattcagaaataaaaaatgccatttgatctaaaaactgaattatttctgaactcatccatactaaacaatcagacaattagcctttaatttgcaaaaaaaataaaagaacgatcatgatgaaaaaactactatttattgcaattattgcagtattaggatgcacagcactccaagctaaaaatcgcatcagaataaaaagagagtcttgggaagtaaaagcaagtactagagtgccaatatctaccccccttaatctttactacgaagggagtacactctttattcatgctaatatagatttagaaaacattataattgaagtaaaggattccttcaacaaaactatctacctagaccttacaagtattcaagctaacaatgaacatgtatttactctggaaaatatatcttccggagaatatattatcgaaataaaatccggcgaaaactatattatcggttgttttatattataagtcttgatatatgtgtatatttgcgcaaataaaatcgcaatgatacatacattcaaatgaaacaaagacgaaaatttatactattctatttaagcattatatgcctattctcatgcactgccccataccccaacacaatactgcgggtggaaaatattattaaagaatatccagatagtgcattaaccattttagactctctgagtgagagtatcacaaaggaatcacaatcagcaagaatgtactattacctgctgttaacagaggcacgtgacagatgttacgtgcctcatacgtctgattctctaatgttatccgtcactgattattatgaaagagaaaatgataaggacaaactgataaaatcctattattacacaggcagagtataccttgatcttcatgaaggtcctacagcactttcttatttccacaaagcttttgatatctctacagatagcaagaactacgctttattggggcgaatatacagccaaatgggaactctatttgcctatgaaggtctcacagaggaagtactacaagcttatcgaaacgcttatcactacttacaactaggcaaagacagtcttactagcgcttatgcactacgagatttaggaagagcattcaatttacttgagataacagacagcacaatctattattataacaaagcataccaattagctaatagcaatggagacatacaaagggaagtaaatattctcgaagaattggcaggcatctatattcaaatgggaaaatatgacgaagcattgaaaacgctacaagaaacaaatagtaaatggcaagatgagaaagatataaattatgatgtttggggaaatttctatgtaagtataggacaaaaagattcagcagcctattacttcaagaaaaatataggacataataatgtatattcagacataggagcctatcggaatttatatgaaatagaaaaagaacgtggcaactatgaagaaggattagcatatctggagaaatatacagaatgttctgatagcatttacgacatatccaacacagaatctttgcgaaaaataaaggctttgtatgattaccaacatattgagaaagaaaaagaatatttgcgcaagaaaaatgcagaacaacgagcatggatcatctttattgttattgccatcgttttaggagttatcatccttattcgatataatagaaacaggaaagctatgattcgggaacaagagaaaaaacttcatgagattaacgaacaacaatatcggaaaagccaactatatatagaagaaaacaagaaaaaaattgaagaattaaaagaaaaggtaaaatcgttcgaacaggaaaacaatgatttacaacaaaaacttttacttgcaaaaaaggaaaagctagaacaaaccaatcaagctatcgaaacatcacaaagagaacaagcattacttgaggaagcgcttagaaggtctgatatttatgcttattgttatcgtgcgatagaagattcctcgatcagactcaccgaaacagaatggaaagaactagaaaatatcattaatgatacatatgacaatttcaccaacaagttattcatactgcatccctctattaccaagatggaactacgtatttgtttactgttaaaaattaaaattccagtttctacaatttcacaattggtatgtcgtacacaaagcgctgtatctatgagcagaaaacagctttataagaagatattcaataaagaagggacacccgcaaacctagatgacttcattgtctctttttaaaaagatgaactaaatctctgatattccacacaaagaagaaatacccgcattcagaatcttcagtttcacccgcaaacgccctgtcggaaggggatagcggctgaaggcacagttttacaactccattcttgaagctttatgaagggagtaaggtgcttcagtcctttcagtccccaaaaacaatttcgaacttgataccgttcaagatatcagatggtacctctcagtgtgtcagaaagtaccattccgcaggtcagccagtaccattccgcaagtcagccagcaccattcaaggagttggaaatctccccatattttattcattcctacacaggctttccgctaattactatccgactcactgtgtataatgaataaactctgccaacagttgaaatagaacctgcatttacctcaaacagagcctgtattcaagataaacagagcctgtatccaaggcaaacagaccccctgtttgatcagaacacactcttcgcttgattgatctgaaataagccggcagctcgccaactttcacctcggaggcgaacagactttagctcggcgatgaatgaagttcagctcggggcttacaaaatttagcccgtatgtcagggctgaaagaactgaaaccacctgccccctttcaaagtatgtcagagacggggttgtaaagcagtgttttcagccgctatccccttctgacagggagcttgcggacgaaactgaaaaagctgaatgcagattacaggataataatagcatagagtaaaagtcatacatctttcattcaattgttgtacatctccgccccaaacgttatacatcatcaacctaactgtagtactgaaacccagtaactgaagtacttctcacaaccaagtcatgtactatataccacaacccatactttgtgtcagaaatcaaatatagtcatctgctgtttacaagtttgtcaaccgcaacaaatataacgattttattaatcataacttataaacagttcaaattcaacctatttataagtcgtaacttatagcatcaccccgaataacaaaagccgcaactcatctctcccgtataagaagagatgaaattgcggctcactatggactaaatagccgtaaagctataagctgatttcaaataatattacagaccaaaagctgccttgatcttatccacgtagtccagtttctcccatgtaaagagttctacttctacggtcttgttgccctcatagcgggagaagaacgttttcgataccacttgcggctcacgtcccatgtgaccataagcggcagtttcctgatagatcgggttgcgaagtttcagacgctcttcgatagctttcggacgaaggtcgaacaactggtcaatcacacgggcaatctcgccgtcggtcatattcacgtggctacgtccgtaagtgtccacgaagatgttgatcgggcgtgctacaccgatagcatagctcacctgtacaagcatttcgtcggcaacacctgccgcaaccatattcttggcaatgtgacgggcagcataagcagcgctacggtctaccttgctggggtcttttccggagaaagcaccaccaccgtgggcgcctttaccaccgtaagtatccacaataatcttgcggcctgtcagaccggtatctccgtgagggccaccgatcacgaactttccggtcggattgacgtgatagacgatctgatcattgaacaatgccagtactttatcatgatggatagaagcaatgacacggggcatcaggatttcgataacgtcacgacggatgatagacagcatttcttcgtcagctttgagctgtgcttcggcagagtcatcagccggctgaataaagtcatcgtgttgcgtagaaacaacaatagtatcaatacggacaggagttccgttgtcgtcatattcaatcgtcacctggctcttggcgtccggacggaggtaggtcatcaccttttcttcgcggcggatatcagccagcacctgcagaatgcggtgtgccagatcaagcgaaagcggcatatagttttctgtctcgttcgttgcatagccgaacatcatgccctgatcgcccgcaccctgttccatcgggtcctgacgctctacgccacggttgatgtcgggactttgctcatgaatggcagaaagcacaccgcaagagttactttcgaacatgtactctcctttagtgtaaccgattttcttaatcacttcacgtgcgatgagctggaggtcaacgtacgctttagttttcacttcacccgctaatactacctgtccggtagttactagtgtttcgcaagctactttagaactggggtcgtaagccaacagtttgtcaagcacggcgtccgatatttgatcggctaccttgtcggggtgtccttccgacaccgattcggatgtaaataagtatcccatctttttaaattaaagattataaattgaaaattaaaattgggaaaataaagaggggaggaagagagctgcggaagcattgccgaaaaggcgtcaacaagacgtgttttagcatttttttccgtggttgcaagctgctcaaatctgtccacactttcatttcggggacaaagataggtattattcggagattatatttatctttgggcaatgtttaacacatatatacaggaaattggtatgagaacaattacattaatgcaatatgtattttccattatccttctggtcatcatcttcctcgtcatggattatttctggaaaggagacgaattttcatggatgtatgagtttgcaaaaggaggaatcggcggaactatcatctgccttctgaaccgtcatttattcctccgccatcctaatcctaaacagaaaaaaatatgattatcaacaataaattaagaactctttttgtactggcgcttcatataggattcaccattgccatttacgccattgtatgccacttcctgaagattgagtttcaggatattcacttgttatatgcaatattggtgggctgtgtggcttatctgccgaggtttatcgccgaaaagaaaagtaaaaagtaaaaggataagcaaggggaagagaatgctgtattatttttctatctgcgccagcagcgccttcattgtctttcccaataccggatgcaccagttcgggggcaatctccgttaaggggcgcattacgaagtcacgttccgccatcaaagggtgggggaggttgagtgctgctccggaaggagaagtaaccgaaagtatcagatcatcataaagcagcaggtctatatcaatcagccggtcgctatatacgccaccgacagacttatgcgtacgtcccagttcccgttcgatctcctgcgtcttctgcagtacttccaaaggcgacagttccgtttctacacacgccgccgcattcaagaaactatgctccgaatcgaatccccaaggggcagtgatgtaaaaagcagacagggaaatgactttccctacctgctcctctatcttttgcacggcagtccggagattctgttctttatctcccagattagtgccgagacttatatacactttcgccattaccggtctattctaccttaaactcccgctccctgtccaaaggaacaaagaactctactttgccacatttcgggcagacatataagtcgaatgcttcgcgattctggaataactcaaacaagtttccaaaaatgcccgtgttcattccttcatgaaactcatattttccggaataaaccatcctgacctggcagcgcagacagtcgatagaccgcccgctatcatcactctcttccgccggagtcatatccaatatcttatcgtccggaaagctgtaattacagttccaacagatttcaaagctatcttctacttcttcgtggcatttgggacagattttcatagcggtactttttcgtttatttatccagaatcagcatcgcatcaccgtatgtaccgaagcgataaccttccttcaacgctacatgataagcatccatcacctgttcgtaaccaccgaaagcggccacaatcatcagcagtgtagacaacggcatgtggaagttggaaatcatcgaattggccacagtaaactcatacggagggaagatgaacttgttggtccagccttcaaactctttcaaatgtccgtcggtgctcaccgcactttcgatagcacgcatcacggttgtacctacggcacacacgtttttacccttatccttggcacggttgaccgtattgacagcttccgcgtttacaatcatctgctcggagtccatcttatgcttcgtcaggtcttctacgtcgatatcacggaagttgcccagaccggcatgcaaggtgatataagcgaaatcaatacctttgatttccagacgcttcatcagctcacggctaaagtgcaggctggctgtcggagcagttaccgcaccttcgttcttggcgaagatggactggaaacgttccgaatcttccggctctacaggacggttgatgatggaatggggcaggggagtctcacccagagcatagagggctttcttgaactcatcgtgcggtccgtcataaaggaaacggagcgtacggccgcgggaagtggtgttgtctattacttccgctaccatcgagtcgtcggcaccgaaatacaacttgttgccgatacggattttacgggcaggatctaccagcacatcccacagacggagttcttcgttcagctcacgcaacaggaatacttcgatacgagctcccgtcttctccttattaccatacagacgtgccgggaataccttcgtatcgttgaatataaatacgtctttatcatcaaagtagttcaaaacatccttgaacatcttgtgttcaatctctccagtacgacggtgcaacaccatcaagcgcgactcatctctatacttcgtaggatgcaaagcgattttatcctcgggtaacttaaatttgaattgtgatagcttcatatctattccttattacgttaattattatcttcgtcgttttctatttcctgccggtcgatccactctttaaagtgttcggggtccaggcaatcttccagacggacatcccccacacgtgtgcggatcagttccgtcagatgggctccgctctgaagcacttcgccgatgtcacgggccagggcacggatatacgtccctttgctgcacaccacgcggattcggatcgtcggttccggatcgtccagacggcattcaagcaactctatctcatcaataacaagttgcttcgcctttagttccacctcttcacctttacgtgccagctcataagcgcgcttgccgtccaccatgcaggcggaaaaggcagggggcacctgctcgatggcaccaaggaagtgcgtcagtgtttcttccaccagctcccgggtgatatgtccggtagggtaggtggcatctatttcatgttccaggtcgtacgagggagtggtagcgcccagccggagcgtggctacatattccttggtatgatactgaaattcttctattcgtttcgtagccttgccggtgcagaggatcatcactcccgtggcgagaggatcgagcgttccggcatgacctactttcagttttttcactcctatccggcggcagatatgatagcggacgtgtcctactaccttaaatgatgtccagccgagaggtttattgaaaaacagtacttctccttttttaaaattcacgttatagagttataaataacgagttgtgagtgggagtaaaatgactcacgacttacaactgcgtaataattactgccaatcccgctattgcacaatagatggcaaagtagatcagctttcctttcttcacaatattaatcatccacttgcaggcaaggcaaccggctacaaaagccgccagaaagccaacaaccaatgataacgcagggatatcccccactacatcttcacctttcatcatctttacactatcaagcaacgcttccccgagaatgggagggatcaccatcagaaaagagaactgcgccagttttgccttgttatctcccaacagaagtcccgtagcaatagtagatcccgaacgggacagccccggcaacaccgcacaagcctgtgccagaccaatgataaaggcatctttcatcgaaatcttatccttttgacgtggcttataatagtacgagaatgacagcagggcagcagtcagcaacagcatgcagcctacaatcatcagtcccgaaccgaaaatagcttctacataatctttaaagaatacgcctacaataccaatcggtatcatcgaaatcacgatattgatcacataacgagtctcatcgttcatctgaaacttgaataatcctttgaaaatccagtcaatctctttccacagaatcaccagcgtactacatacggtagctacatgcacgacaatcgtaaatgccagattctcttccccttgtatcccaaacaatgccgatccgatggccagatgaccactgctgcttacaggcaaatactctgtcaatccctgaatcaatccgaggatcattgcttccaaccaactcataatttctttttattattcttttgttttaggtttacgcaacactgcgtatatcatcgatataaagccaaacaggcaaacaacaggtgctaccttgattctgcgtacactgaaaatatccggttcgaaaaccgtttcggacgacgtaggtcccgtcatcaatagaaatccgataatgacaatcgccatccctatcgcgagcaagataaagttcactttatcgaaggcaaatttctgtttgtcagacataagcttattttgttacaagttactaaatttccaactatatgttattctcctaaatataatataaggtattggctttcatcctcagatatttattcatcgagatgtaagcacacaaccacgttatcactattccgaataccagcacgctgccgcagacaatgagcatcacttcgggtgtgatgacctgaatcagctcctgctcgtacgtcaccgcccagtaggcagttcccatcagaatggcatcggcaagcatacctgccaatacgccgctccacacgtttttccgcaggaaaggtccgcggataaaactccagctggcacccaccagcttcatggtatgaatgaggaaccgcttggagtagatggcaagccgtatcgtattgttaatcagtgcaaaggatatgaaggtgagcaccaccgccagcgccagcagcacaaggctgatgttccgtatattctcattgacggcatcgatcagctctttccgatagagcacatcctgtatgttagagttcttcttgatcattttctctatcttcgcgatactgtcggaattggcataatcggagtgaagtttgatttcaagggaggccgtgaaagggttatagccaagaaactcttcgggatcggtgcccatcgcctccgtctgctctttcagagcctgttttttggagatgtactcggactgcttcacaaaaggttcctgattcagtttcttctggagtttcagaatatccgcctccttcatgtcatcactgataagaacggagaaactgatattttcgcggacgtatacagacatattgtgcgctgtgagcacaaagaacacaaccagccccaacagcagcaacaccaatgtcgtactgatactggacgttatgaattgcatatcgaacagtgacttcgacttatatctgtttttatttcccatgcgctatctttttttccggaatacgtaaatcatcgaactgctccgttctttccgccccaacgtgctgaaccacgcaagcgtccccacatacatccctttgaggaaactgcacgaactgccgcgatgtttctcactcaacatcgatacatagaacgcatcaaacggcatcggatgacgagccgccataatgaatccatgacgggaagccagctgctgaatagtgacgggagtgaaatgccagagatggcgggggacatcgtatgccgcccaatattcaccataacgtcctgcatcataggaagaacagttgggcactgccacaatgagcatccctttctctgtcagcagttcacgaagcatttcccatgtttcattgaggtgttccagatgctccatcacgtgccaaagggtgatcacatcaaaactgccgggagcaaactcctgcaaagcggattcgggttttacgtccaaatcgaaatgctcctttgcaaaagcacgtgcctgcggacttttctccactgcttccaccttccatccacggcgtgccatggtgtcggcaaagtatccggttcccgtcccgatatcgagcaaacgccctcttttacggtgtgcttctcttgctaccagacgcgctttgcgacccagcatataggaacgtacataatggtagatggtattcatcgcgcccttgcgcgtatcagtgtgggaaatgtaatcgggagtctcgtaatacttgcctatctctgcttctaccggcacaccttgcgtgaacgtaaatccgcagtcttcacacgaacacagttcaaactgttcgcccgaagcataaaaatccgtacaagtcatgacgcgtttcaagtgcgtactgccacacaccggacaagcatttataatgagtttctccattaatttctaagcaaaattaagtgctgcctcgattcacaagacaacactattcccgaatttggtgcaaagaaacaaataaaaagtgatggattgggctttcgttaagtacttttaataatataacgttactctgacacttatttcaaagtgtatctcaaaacagagaatgaaattaaatgtgaatcaacttccctcaatcagaacagccatttctcagtacatgaagaatggataggaatcatctcgtagaatcagaaatatacaacacaagtacggactgaacaggaaaaacggaaggattcgcgattggcatatttccgaatcacacagattttactttatagcgatcaataaaacacagataagatcaaaaacataaattccgaatatgtatttcatcatttaactttcaatctaacattttcaaactcttctgtaactgacgacatccggagcaaaacaagcactcaaagtacctttttacccattcctttaaatgaagcgaagtgcttctcaccgaccaacgagtcgttcctttaaaaccaacgaagcttttctttaaatgaaacgtctcctaacattggtagttatcatgcatatttcacctatttatatccaaaagcaagattattcctgcatattcttgcatctttttatgcagtatttcttctatcaggataagtcttaacatcccctttttaaaagtaatcttcaaaatagaacatataatttgtgagggcattcatgcgggaacgtatcttctaatttaataggctgccacaagctatgatatcaattacagcagattttttctccaccattaaaatatctcaaatgaaaattctagttaatttcagtgtcataacctatttgtgtaaaagctgatttatctaattacttatctttgatgtatacccatattcgtggatcttgtccatgatagccatcaggcatatcatctggatatgaaatacctaatattctactaactctcttttcactcagcgcttttttcccttccaaataaaaaagaatatatttatctttgtaattcatagcattggtaggtaaaatttaccccctgacaggcaactgccaggggaatagtcaatactattgatacgtatatcaaagaaataatcacttttctcataatcaccaaaatgaaaaatttactttatttcaacccatcctctacttcaatgaataaattaagtgattcatctatttcaagatccacaaccttttgactctcgaaaagtcaaattgttcgtgccatcaaaccatgacagctgtaatatcatcttctgatgtagcaattcattttccatctttctgaacttcccaatagcaatatgtcattatacgattcccactatcaaattccataagaataattgagtaattacctccatcagaactactatatacgatgttacaacctatatttttttttaattcagtattaaaattcatattatctaaataaatcaattttcacatagctcctcgaataaaaggtaccccaacatgagtatatatatcgcttcatgtcagggtaacacttattaatgcaagaggccaatctatatcaaaatatctataattatttcatatttataatcttccttatttggaatactacaaaccagataataataataatcgtaaataaatgaggtataagttctgtaccataataccaataatcatcttgcatatctgagacatttttaaccatagtcccaaaaacaaaattaattaattgaaaaaataatgcacctaaacttagtagcactgcaactactctgaaaataattttcaatatgttattgtccataatttatttgtatatttggattttgtattaaccatgaatctaagattggcataagttgattccaagttataccattgttagcattccaaaaacttccactatcaatccaatctctatgcctatattgatacccttcattgcttttctttcttattttataattcgcattaggaatatctctgctaccatctattggaagacttaatccttgtacccaatcattagtaatcgtagcatcaatcaaaaatgttccaaccgagcccatcaattcagaaggcaaccatgtatttagatgaattgagaaatcaacattccaaccttgctcttttaaatatcgaataataccttctgaaaaagcacctcccatactatgagaaataattcggaatacatcctcttgtggattcatacccattatcaattgtttgtaattttctttagcatatgcatatccatctaaatttcttaaaaaggtagaactacgcaaatagttaaaatcaaagtcggtgaaataggcactttgatcattaaaaaagttttttgcacctttaacaaaagaactatttactcctccccaataagtgccacctcctctaggagatccaaaccctaaatacccattaacaaaaataatcttctgcccatcggggtcaatacaattatgtggtgtatttaatccatatacatacgaactaattgaataatacttctcactcatcggatcaaccgcatgccatctaccaagcgctgcatcatacatacgcgccccataatcataccaatcaagaccattcttcctatcaagttctttaccgttatacttacgaatgtttatctactaatgtactctctgcaaatgacacctcataaggataatagtgattagtccggacaactgttccatcaaactttgctaccacacggctattaccctgatgatcctgaagataaaaagaatactgcccatcttcaatatagccaacttcatttaaactgctgtaattctaatcccacttaaaaaaacgtcgtattctctcttctttatcataaacccctttattataaatataccttaccctttttgataaagaatctcttaagtcactcgaataaactgcatcattatgcattattctaaatttctgtgggatattattaatattcaagaagcaaaaagtcgaatcgctaaacagcttatacatagacatccaaatatccttatccggtaaattctgaagaaatgaatggggaggttcactatcatatttcaaggatttaaaatcatgaggggcaatagcaactggaagtgaatccctcaaaaccaattttaatgtatccggtccatttattacagcatagcacatactcctcgctgaattcctcgataatagcaaaacggaatcagtctgatttcttacaaatatttctcctgagaatctttctacataattcttcagactatcaatctcaagttcaaaaaggtccggaatatatgaactgggaacaataatatcgtgcgaagtcaatcccatcaatgcagttttctcctggggtatatctccagaaaaatacgaccaaagttccggatattcaaatagacgataataattaggcaacatctttactaagatatgtttatcttcatattttcgaagagccaacagccaatcacgacctctgtttaaacataaattttcatgaaagttagagtccgaaacaaaacctctctcaaacaattctgtgcgtgacatttcaggctcatctaattcgataaagcaaagatatctttctttatactttatcactctggaaggtaactcagcaccatcagaaccaggagaatctgattcaccgatataataaagtgaattagaatctgtcgaaaacacttcatctatttctatatatgtcgtaagtaaatagccactatctatcagcacttccacctgttttgctacacgctgatgaatatcttccaaagaaggggagggggatatgcatccccccagtataattaatagaacaacatagactaattttctcataagcatatcatttacgttttatatattgcaataaatctgtagcatcatatacacgaatagaatttacccgacttgcatttttgatatattcatatatcataccctttttatcagtactcacacggttatctttcatatacacagcattcttacgttgtggcttagctaagttaaaatcattaccagctccacctttcgttcctccgggcaaatgagaatgaatatctataactttttctcctttcacagaaagtttattttgagcatatacaccattatctaccccatatggatctcgatctgtcgcaacaacagctgttcttgtaccattatcatcataaacatctaacttccattcaacagttgtgtgatcagcagcaaatttaaaaacagtagcagctgtctccaaatcttgagtacttccataagatttcttcacccgattttccttctgctctttcgcctgcatactatgcatttccccaagtaacccctgatttacagttactgaaatagaacgatcactggaaagatataaattatctgttgaacctttacctctcttatcaataggagtctcattaaataatcttcctgatctgctgataacataatcatcctttccgtctaagtctatcctcaacacaggattgttcttacaataagtatacggactccaactataatacttctcactcatcggatcaaccacatgccatctaccaagcgctgcatcatacatacgcgccccataatcataccaatcaagaccattcttcctatccagctccttaccgttatacttataaggctgcacagcattacttaccgaacttgatagcagaccgccaaacggataataatggttcacttcttcaacattaccactctggtctacaaccacacggttattacccaaatgatcctggacaaaatagtgatacttagaatcggccagtgtaacatagccagcttctgtaagcaacttgacagggattccattttcatagatcacattgccgcaataatcagttactgtagtatcactccctatgatatgcgtcgtacgaagttttattccatcagcatcataaagataagaaatgacatgaccgttttcaaattctatgcgactcggtaaatttataaaattatattggatatcagccaacttttcactcaaataatatcacacagaaatgtacacaaacaaaatagaggatgtgataacacatcctctaaatattttcataaatttcaaatagacaactattatcagaataaatacactatcactattttgatttaggtagatattcatctatttcatctggatggtcacgtaagtattcttttataaaagacggtaaccattcataaggggtaagagaatcatataatacttcctgaataaacttttgaagttgctttggatttcccttcatcaacacgtcatttaaaagcactccgtaaccaccggcaccaatgcagacttttatatcaggcctcctttcaccgtttatcggttttaatcttataagtgaacttaccctaagatcgatataagaatcgggattggcaggtttcaactgattaaccagagtcaaaaagcgattgataatcttcctatcacgaataattgttttatggctatcatttccaaatacaatgtgcaaacaatcggtgataggaacatctgtatccacatctcctataaaccaaaaatttacattttccacttcgttactatcaattaaaaattgattgcttttacatgatgttataaacagtaatagcaaaaacaatgaaccaccataaaaacattttttatggttcagaagtccatacagctttattccttttctcatattcctgtgtcttttgtctatcaatcacatttgaagtaacgcctttcgttattacagttttcccattatggtttcttcttgtaacttgaccggaacgggtttctccattagcccttgaggttttctgttcagaaccagttatcacccgcctttcttcttttgtctgatattgcgaatcgctacctcgtgctctatttacttcatactcttgagtatttgttttatgttccaaagcatgatctgcttcatggtcaaatacggtagccggagaattgactattccattatctttttgcgatccccagttactcttccaataaatacttccagccccacgtgcggcattgggattatatgagttctcaaacaccgcttccatcacatttaccttatattggtattctctacaattgctaccgtagaggctccacctccgtttcctgccttcaatccattcgctttattatattgataagcagtaattacagattgtacaaatgaatttggatgagttatgtcaccaccactatatgaatatgaaacctttttcccagcatcattattataccaaataactactgtatttccgtccgggtcaatatgatttatcggattacccatacaataagtatacggactccaactataatacttctcactcatcggatcaaccgcatgccatctacccaatgcagcatcatacatacgcgccccataatcataccaatcaagaccattcttcctatccagctccttaccgttatacttataaggctgcacagcattacttaccgaacttgatagcagaccgccaaacggataataatggttcacttcttcaacattaccactctggtctacaaccacacggttattacccaaatgatcctggacaaaatagtgatacttagaatcggccagtgtaacatagccagcttctgtaagcaacttgacagggattccattttcatagatcacattgccgcaataatcagttactgtagtatcactccctatgatatgcgtcgtacgaagttttattccatcagcatcataaagataagaaatgacatgaccgttttcaaattctatacgactcggtaaatttaaacaattatattggatattcaatattttcttgttcaaatctttcgtcatattaccattttcatcatattcatattcagcttctttgtttactccgtctttgaaatcaaagccattgccgtaaacagaatttgtagccctatctgatactgattttagttggttcccattataggacattgccagatcatctatcaagccgtatccggtagatgaagtctgtccggaacgtttgatccctaaaatattactcatcttatcgtatccggttacttgttcattgaagcgattctgattttgaacgagaacactgccttctccatacaccgcattcgtcaaacgattcaaattatcataagtaaagtggtagcctctcattatatcatcttcacccgatttccaaaccatactgctgatattaccattgtaatatggaatacccgttccgtccgtataatgcaatacttgctcaaaagatgaaccagtgataccagttagccaactacgaatattatacgaataagacgtattcaacagaccgttatggaacgtcttccgggataagcgtcccaaatcatcatacacattgtcaataagaatcacttcctgagcatctcccaaacgatgcagcgcctttacaagacgttcggcgtgatcatactcataggtataactgtcactcaaaatctcatttccagccccggtctgacggtgtaaatgccgcaaggcgttcccattaaaatcataggaaaagaaatcacggtccataccacctaaatggttgtcagaaacagtttgagaaaggcgaccacgatcatcataatacatcactgagtaattgtagggagaatccactccatattcaccattacgatactgatcgtatgcatccgtatgcaacttagctattcctgtcaacattcctttagcactggatgacgtagcggcaaaaccttcttcatgggtatatctaaattcatctcttgccgaaagatctgtccgatacataaagtcatagttatcataataattgattacctgaactaatggtttcggccccactaatcctgccataagacttccactaaactgataccccccatattcagtacttcctacgtattgacaaacataccaattcgacaatccactaaaaataggttttaaataaggattatcaaacggatcaatcgcaactttacatactccctgcaagcatacacgaccgaatgcatccggaatactaaatttccattctcctcttttacgttcctcgccattctggctaaatataagattgttgtttacattatagacatagtattcccatgaaattcctggaagctttttagccatgaggtttcccgccacatcatatttatacaaatatccatacatatcgagtttttctgcaggaatattacctacactcaactgatcggacaatgcaggaggaagaacagcacaaagttttcccaaatcatcataaatatagtaagtatccgacaattgcttatcccctttcagtcttgattctatacgacgttccagaacggttctttccaaacggtctttaaattcaaacaaagtgactccatcttcatcctctgagcgtgtaacaagcaagcttccattttcatactgtttacttacactaatatttaatgcttctcttgccccattgatcaattgaaaaccgaaacaacctaaagtatcattaccagcgatattaacgtactcatctattttcaatgatctgccattttcacgccatactctccccggattatgctgtttaattactttttccaaaggagaattttcgtaggtaaaggttaaatacggataagcatctcctccataagtattgcgtgccaattctccacaagaagctacagatatgaaatcacctgtgttttgtgtcgttacagctggcaaccatgtattggctttacgcccccacccatcatattcttgtagggttactaaatctttatgactaggactcacaccttgttgtaccgtttctttcgaacgccccagcccatcatagtaattaaccacaagcataccttcttccttatttcctgtcctactcttgaaaacagaaacagcatttttgccaaaacgttcgggcaatagatcatttccccaatttattgcaggaaaaggaatagccggcatcggctgttcttccggagcaagtccttttgtctctattgacagagtcatgatataaaataaaggaagtggtcgaattgagtccatcggcaagaccggatctattggcggaaaaggatcaatcggcggaaaaggctttattggttcatgcgggtcgatcggtttaatatcaaaagtattagttttcaatacacttgcagcattcacaccattatcatcaggaacaagaatatctttgttcttttctattacagtcgatgtcaaacaatatgtaccggcaaataacaaaagagtatcagtgaaactcactgatgataaagaatccggatcaacacttttcgcattctgataatacacctgattagtgagcaaattatcatctgttatttttaattaacattccaattgtcccggaactttctccatttccattcccatagtgaaataattagacttaaaagaaatatataatggttctttcacacgaaacaagtagtttgcgcaactcactgacgatgtatcagaaatgtttatatggtccagatgttttgttttaaccatatccctcttcaacgtgtcatattcgagcttacctatctcattctgcaaagaattctgcgcaggtatttctatcgaaaatcctgatagcaaaattagaagtaatattattttatgcaatttcatagttgtcctcctttctctatggctacttctccactttcaatcttggagccataataataattgtaatcatatatatttaatatccgtttttgataatctccatctttaaattccataatataattctctgtcaggcgacccagaaaatcatatttataaaacacagtgattccattaggctttgtttctgagaccaaacgcaactcatttgtatatttgtaaatatagaaatgcgttccggatatcttatgcctgatattttctatttttagcaaattagttgcagagatatcggatgaagagaaatccttcacattcattcccaatgcttcttccacttgattaagagtggcattttctatccgtgatattaaccgttgaccttcagctccccatatcaatacaacgggcgttgactcttcgtgaagatatataggattcccataaccatccacagcctgcacagtgtaatgtttatgcacataaccatctctatctgtactaatctgctttatataaggtataggacccatatactgatatacctcttttaaataagagccgcctgtctgttcttttttactagaaaccggagatagtatatgtgcttcttccatccatttatattccggtaaagttgcagcataaacatattctgtcagagtactttttccatcgctgtttctaccggctatttggcttaactgcttatacttattatattgatacgccttttctataacaaatgccgtatttcccgattgaggataaagagtttctataacagagtcggtcagataagcatgtgtatatgtacgagttaaagtccccacttttcctagcatgaaattgtctaaatctgtacaaaagaacaacaccatttgatcagctgttacaaatgagcctggagttacctctttgtatcggtaattcaccttctttcgcaaacgatcattgacatcatagtattcttcagacaacaactttcctctctccatagaacgactgctaaatggcattgtataagagttcccttcaaacatagaataaaaagcaagctcgtcataatgagtattaccataaatatcctcattatagttagagtaatgacgcacaatataaccttgcgacttattatctttgtcgaacgcttcttcaattacacaagaataacctacatccggtgtattcagattagtaactgatgggaaaaaacctccctttgatttgagatataacgatattgcattcttaggatcaggctccttatctccatccttaagagtatacaccatctcattaacaggaagacttttcaatattccactactttttccaaatcggtcacgggtattcgaatagtaatattgcttggcaccaagcacattatcttcattatccagattggtaatacgccgaatacgcaaaccgcctgcagtaccacttttgtctgttaatgacatcaaagaaggagctaccacttttgaatagttgttcaattcatattcaaaacggctttttccacctgttggataaatgacttccgtcaagacctctgccaaagtatattgcaaactactataagtctgagaaaaattaggtatctcggcaaaagcaacacttcctcctgtataatatccccacgaatcggcaatcgggcgtacataatcatttggcatacgtttttccgaattataaagaaaacgatattcaggtacgcgacctccggtcaaattctcaggtatattataccaagtaagaaaataaaatccatgtgggtgccatacatagttagggatcaaatccggattccctgaacgttccgtaattaaagacaatttagtacgattattccttgcatagtcaaaatatatagttttcaaagccttggagttctttcctttcacataaatacaatgaagaattttatgttgtagttttgatttaatcgattgacgcaatgttgcctgatcggtattatcaatttggtttcctaaaaacagagtaaattgattagccgggtcttcaaaattcatgttatctatatcctgacggtcataatttgcattgtctttccatgccaaataactatcaacaaacttatctccatatccgtattcattgtaataattgaattccaatatctcgttaggtgtttttatagtctttaaattaactgggaaaagcagatacccagtcatccctgaacgcccactttgtataccactataagtgcatggtatgttggtcaccactttctgttggggtacataacgaagatcacacatgatagctgaagtgtcataactgaattctattacccgcttgtctacggttgttattttggacaacctccaggtagtagctattaaatcactgttatagcgggcataataaggaatactatattcagtagcgttgattccaccaaattcatacctgcatccatcaggagtaatcagcgtaaatttattgaaaaaacgattgtttcttgtgcttgctccccatctacttacatcaagacgttttccgacttccgacaaactaagaaagccttccccatcaacaggattaaattccacacgtatatcctgatcagaaacaacattccactctccattaccggcatagtagaaatttccagaataaccacaaacactaaacgaaaattcgtcagcagttaattcataataatcattttccgtgctttgtatatgcatcgtttctgctttaaactgttcattactgatatttttcaatttagaagcatgtgcataataacccggagcatatccatttgattgacatttctcatcatacattccacgaacagaacgtgtaatatagccgcctgctataagattccatccaagtccaagacaaccagactgggaattaggctttaccgaagccaaatgataacttgcagcaagtgataacgaatagttaccagctttcaattcataaataggcacggatatatccggaactcccgtatataaactaactggaacttttccatattctcccaaaccggctatttccggactgggtacatttttaataggtatttgttgctgacctatacagttgaaactgaatattgccagaaaaacaaatactgatagtagtctttttttcatattctttgatatataatagtttcttaaataaaatcacaatactaagaaactccctgcccgataaagtagcgcgcatattcccatgacagggagttcccgttaattacttctcttacagattcatcgcattagcacccaatacgcctgccacagccgacgctaccgcgataaccaccttcaggatcatatcccatacagatctcttcattgccatcatttacctcctttcttgttctttaaatagtttagtttactctgtgtttcttccgtgtcttctgccgcaaattctttaaattcctgctcggcatcaaagcacggacacgccttcatccactcttccggttctatctctccattaccgttcctgtccggcgagagatcccgatgcccgcacacccggcagccggggaatacctccagcagctgatgaatcagcagccgaagcgtagcacgctgttccggcgtccgggtgtctgccgggcgtccccgacagtccagaccgccttcatagcagattccgatactgctggcattaaaaccttttgcgtgtgcaccgatgcgttcgacagggcgggtaagatgcaccgttccgtctttgcggatgtagtagtgatagcctgttccgttgaaaccacggcggcggtgcatcaggtccaaagcctccggagaaagcgtacgattcccctgcgtggcggtacaatgcaccacgatcaaattgataattctcatgtgaataagtgattactagttagttaagtttccgatttagtttagtcgttcgttcttatattttgtgttgtgacgaaaggttatactgtcgggtccggtgcttcctcaccacctccttcgccaccatcgccgccacccggcttatttgtatttccactgccggaagccggagtgtctgtacggtcgaagcgcacacacttcgcaccggtcaccaaagagcgggtagcggtagtccgatcggggttcttggtgaagttgggaaggaaacggaccgtaagagaagcttgcgcagccgacacttcttccgaagtctccacccctttaccgttggatttcatcaccatgcggaaagtcccgaaaccgtcaagcgacacgctttccgatgcttgtagatgctgccccatcacagtcaccaggttatcaagcgtattcttcacatcacccggggagagagacgagtaagcggcaatctctttagcaatctgcgaagtgctgatattagccgtgtatatcacacggggatgaaacatttttttgtgatttttgtcttccagaacagactggaatgacttgtacaatactgccataatcgtaatagtttttttgtgttaataatttcgtttagttttgtcctcaagcttaatgacattgcaaagataggagcattattcagactgacctaatcattttttcaaagtgcgttcataaattaattaattatactcagcaggtagtgcccgggcaatctgatctttccattgctcccccggatggtattaaatcctttccaaacagggtttccaatagctccgaagttacttttaagaataatggcatattgttcggaaggcggaactttgtaaagccgcaggttatctgtcagtccctggaagttacgctgcacaccatcgcatggcggttgcagacagtcaatatcttcctgtgtcacagccgttctacttttcaaatattttcctccttcatctcccccttgaggagggttagggaggtggtttactttgttttgatttatttttatttgttttcttttgttttgtgtacccgatgttgcaatttcatcctccattgttacagaatcggagcttgatgttaccgtacaggcggtcttgtgatcagcatcaccgtttaacgcttccgcacattcgctatccaaagaatcatccgtactacttttaccgctctgagacgaacggtatgaggtgatttcttccgattccagcaggcagtagtccggctctatcagcgcactgctacgccgcttggtgatgaaaagatactgccgctggatgtcggcggaagtcaggatgttgtattgccggaaaagtccgacatcaaacaagccatattccacggacagactgatgatacgcttcacatcatccagttccgtactgtaaaggctgtccacaagctcctcgtaaaattcgtcaccgacagagatataataccctttcccggcatagatgtacgacagcgtttccaccagtgtggcaaaggcagaatcaccttcacgtctcataattcggcgcaccatccgatcgtgcataaagctggtgctcatggggaaataatccagtccccgttttattcttcccatagcgtattcagtttttctttttcttgtttccgtgagatactttctgccacaacctgacgggcatgaagaataagaagcatccgcaaagcggggtctttcacctcggttatcaccggataagaaacaggtttgttttcaaatgatgtacatcgtctcaaatcacgacgcttgcgggtgtttgccttgcgacactccttgcaataattgtcaagggtcccggtgcgtttgtttgtataaaaggcctcatgcggtagctcccgtttgcagcacccgcaaatgtgcagagattgattcattaaaggttccatattgattttgcgttttaaagttttcatgcttaaatatttgtttatgtgattatcggacatatagttcctgcatattggggatatatggccagcgtattggatctatagctcctgtatgcaggatatatagatgctgtaaaccgactcaatatcactggtgttcatccgatacagaatcttccggaagggggtggatgaggcattttacaacctttcataaactttttgccgtttttcatggttattctatttttaatttatatttttgaaacatatttctaagtttgctgctacaaagataaagcagttttctcacataaaacaaacggttttagaaattaacgctaaaaaattatataactgactatcaatgaacgaataagaagttccaacatctttacactaatttaaaacaagaataaaatggatacatttctagatgtttcgggaatagtaaagcgcgccaagcaggcgctcaactttaaaaaggacagtgaactggccagttacttaggtgtttcacgtgcaacattatccaactggtgcgccagaaaccggattgactttcatctgctgctcaacaaaatgagagatgtagacctcaattggctgctggttgggaagggtacccccagacatcaaaccaagttatgcaaaagcgatttagcaagcggtgaggtccagatgattcacaaccctaaaacagtagaggcgttggacgaccgcagcgttgccctatatgatattacagctgccgccaatctgaaaacgttgctcaccaacaagcgacagtatatggtaggaaagatacagattccaagcattcccttatgtgacggagccgtctacatcagtggcgacagcatgtatccgatactgaaatcgggagacatcgtaggctttaaagagattaacagtttcagcaaccttatttacggcgaaatgtatctggtttcgtttactatcgaaggagacgagtacctggcggtgaagtatgtgaaccgctcggaaaaggaaggatgcctcaagctggtaagctacaacgctcatcacgacccaatggatatccctttcagcaccatcaatgcaatggcaatcgtgaaattctccatccgcagacacatgatgatgtaatttgaatgacgcttcttttgctccggaaagaggaaaagggcaaagtttaaacgaagtgaaccccgaaagtttattgtctgactttcggggttcatttcattttgaaataccttctttaatatattgcatgggctgactaaaaagtcggcagtatctcaaatctcctccttcgggaaggaggggaatttatgatactatcgatttttaatcagtcccgacatcgagaataatatactagacttcttcgcctttcagcgtagccgaactggcttccgtcacccgcacattgacaaaatcgccgatacggtgcgtgcctctgtcgaacaccaccacccgattctgctccgtgcggccgaacaactgatcgcgcgaacgtttggaaacgccttctacaagcacttcatacgtcttgccgatgcaacgttgattggactccgcggacagacggttctgcaaagcgataatctcattcagacggcgaactttcacgtcttcgggcacattatcttcaagatgcttcgacgcatacgtccccggacgttcggaatatttgaacataaaagcggcatcatagccacattcctccatcagagaaagcgagagctgatggtcctcttccgtttcggaatggaaaccggagaagatatcggtagtcagtccgcaatcgggaatgatacgcttgatagcggctacccggtccagataccactcacgggtatatttgcggttcatcagtttcaagatgcgggagctgccgctctgcacagggaggtggatatgcttgcacacattcggcacttgggcgatcacttccagcgtttcatcgctcatatccttcggatgggaagtcgtgaaacggatgcgcacgcccggagcagcttcggccaccatacggagcagcatcgggaaggtaaccacttcgcccgtcggcttctcgaaccggtaagagttgacattctgccccagcagggtaacttccttataacctttggcaacaaggtcggccacttcattcagaatactttccacatcacggctgcgttcgcgtccgcgtgtataaggcacgatacagtaggtgcagaagttattgcatccgcgcatgatggatacaaatccggaaatgtggttgccgcagatacgcgacggaatcacatcacggtaagtctcggtcgtcgaaaggtctacgttgatcgctttctcgccggcctctaccgcggcaatcagctcaggcaacgtcaggtaagcatccggaccgaccaccagatcgacatgatggttcgtaatcagatcatccttcacccgttccgccatacagcccagtacgcctacaatcagggccttcttctttttcttcagcgagtggaaaaactccaggcggttcagaatcttctgctccgcattgtcacggatagagcaggtattcataaacactgcgtcggcctcttccagcgtttcggctaccgaatagcccgccatctgcatcaccgaagcgatcacctcactgtccgccacgttcatctggcagccataagtctcaataaacaacttcttgttgtcatcagcagttgcggatttaaagtccgctcccgttaattcgttcatattcaaatcctgttttaaatttgtccgcaaagatacggcttcgaattcaataagcggtaaaatggtacgaaaataacgcaaaaacttgtagttcaggcattattctgataattaatgttaatgaaataaacatttacggggcatatccttgctaaatttaattttatttttcacatttgtgcaatgaaagaaacattagattttttcatagttaaggtttaggttaaaaaaattaaggggagctgtgaagctgcccttttttcataacaaaatgttagctcaaaccagatataatgtgtaactttggcagattaactatttagaagtgaaacagaatggaagattttttgaaatttctcctgatagcaggtgtcattcttgtgggaatattcaaagaggtgagcaagaacaacaagtcgaaaaaggctcagaataaacgccccgtcccgcctgcaccgtctccggtcgaagtagatcctgatgctattcccatacccgaattctgggggagaggcagcaggactatggacgaactgctccagcccatacccatagaacaaccggctcccaagccgacgccgacatcaaagaagatgccgacaccggcgccaaagaaaaagcaaaaagaagaagtatctgtagctgcctccatagcaaacagttccgcacaagataaacgaaacgcgaagcaaggttcccactataaccatccggaacctgacagcgaccaagacttctccatccattccgtagaagaagcccgccgcgctattatctggggagaaatcctacagcgaaagtattaagcgataagtattaaccaacaaatatcaaccgcatttaacgcgaaattatactatttatgtcattcaatcgtatttcggcagcagaagctgcaagcctgatcaaacatggctacaacatcggtctgagcggatttactcccgccggaactgcaaaggctgttacagctgaacttgcaaaaattgcagaagcggaacatgccaaaggcaacccatttcaagtaggaatttttacaggtgcttctaccggagaatcttgcgacggcgtcatgtctcgtgcaaaggccatccgctaccgcgccccttataccaccaactccgacttccgcaaagctgtgaataacggtgaaattgcctacaacgacatccatctgtcacaaatggcacaggaagtgcgttatggcttcatgggcaaagtgaacgtagccatcatcgaagcctgcgaagtgactccggacggaaagatttatctgaccgctgccggtggtatttctccgactatctgccgcctggcggatcagatcatcgttgagttgaacgccgcacacagcaaatcctgcatgggtctgcacgacgtgtacgaaccgctcgacccgccttaccgccgcgaaatccccatctacaagccaagtgaccgcatcggattgccttatattcaggtagacccgaaaaagatcgtaggcgtagtggaaaccaactggccggacgaagcacgctcttttgccgctgctgatccgttgactgacaagatcggtcagaacgttgccgacttcctcgctgccgacatgaagcgtggcatcattccgtctactttccttccgctgcaatcaggcgtaggaaatatcgctaacgccgtactcggtgcactgggacgtgacaagacgattcccgcattcgaaatgtacaccgaagttatccagaactccgtcatcggtctgatccgtgaaggacgcatcaaattcggtagtgcctgctcactgactgttaccaacgactgcctggaaggtatttacaacgatatggatttcttccgcgacaagctggttctccgcccgtcggaaatctcaaacaatccggaagtggttcgccgactgggcattatctctatcaatacagctatcgaagtggacttgtacggtaacgtaaactctactcatatcggtggaacgaagatgatgaacggtatcggtggttcgggagacttcacccgcaatgcttatatctctatcttcacttgtccgtctgttgccaaagaaggtaagatcagtgctatcgtcccgatggtttctcatctcgaccacagcgaacactccgtgaatatcattatcaccgagcaaggtgtagccgacctgcgtggcaagagcccgaaggaacgtgcagaagccatcatcgaaaactgtgcgcatcccgactacaaacagcttctctgggattatctcaaactggccggtggcaaagcacagactccacacgctatccaggccgcactcggtatgcacgccgaactggccaagagcggggatatgaagaatacgaattgggcggagtatgccagataaggcatgaaacgtctgtcgttcatactatcattcatcgtttgtatttgcgttgcaaatacaaacgatgttttttcgcaaaaaagggaactgcaacagttcaagggcaaggtgaccaaccaagaaggagaaccggtaccctatgtcagcatctatgttccgggaactggcagagaaacctcttcggatatgtctggaaacttttctataaaagccaaacataaagaaactgtttacttcagatatataggaatgaaagatgtgcagatacaactggataaagataatccgtcggaaattcttgtgcagataaagccggatacttttcgccttgataacgttatcattaggaaaaagcaaattatcgaagttaaacccgaagatatacctaatgatattatgatcactattatagaacatagtcccgactttccgggcggattaagcggactaagggagtatctgaagaaaagcatacagtatccgaaaaaagctttccgggcaggggaagaaggtcaagtcacaatagaattcaccatcgacccaaaagggaatgtaatcaatgcacaagttgtaaagagcgtatctgccaaattagacaaagaagccttacgcatcatagagtccatgccgcaatggaaaccgggtatgcagcgaggccgtcctgtagcagtgcgcatgtctgtcccaatagacttcgtgatcgatcaagtctacaaagccattgattgaggggaaataaaccgaaagcctctcgtcagaggttcagcactcatttacatggaatagtcgccaacatatggaacggatagttactctccgcaacagtcattccgtttgccgcatagcactcgctatccgggtctggtaaagtcattgcctgctgtaaaagagcagaagatataaagtcagactccgatcgttctgatatcgcttcgctctgtctcgcatgctttttcggagaagcagacttcgactttgctgcatttgaagtagctaccaaagacttcagatgaacttcccgataaacagtatctacccgttcatggataacaactaccgtatcaatgactgtagtgacaacggcaatctgatcagattgcgtattacttccacccgggaagccatatccgatggtccatcccagcagacaggcagctgtcagccaccagggagaaaccttcagtctcatcctcttcttttgattcttccgaacagcttgcattaaagaagaaaaatcagccggagtatgctccgatttttcctgttcgtattgttctttagcaaagtgaatcaactgctgcacatcctgtgacttttccagtctctctaaatcatcatttttcattttcagttgtttttggggttatagttagacaaagaacgctgtaatattttaagtgtatagtataaacgagacttcactgtaccttccggacaatgaagaatctgcgcaatttcccgtaccgaaagctcttcctcatatcgaagtgtatatgcagccctttgttcgctcgttaggctggcaagtactttcttcaactgctcattaaagattctacggtcatgcatgctctcaaactccggcgaaacacagtaatccttttctaacggatgagactgttgtgaaaaatattcctcctctatttcacggtgccggtattcattcttacaaaaattatatgcaatggcaaaagcccatgtggagaattgctttccagtctgataactactccgtgcttcataaatgcggagaaataactcttgtaaaaagtcatctgccaacgcaacgtctccggacatcatacggatgaaaaaacctttaagccggggagcgtagcgacgataaagttcctcaaatgccttctcgctcttcttggaaacaaagcgttccatgagctgctcgtccgtctcagtgtatgtcaaagaactgaatagcatcatagtccactccatctattagtttctgatattcttttctcatatccttcccctgcttaaaaggtccacccttcttgcgcatctcatcgatataggcaaaaatcgcatccatcagctttacatatttattcatctccacatttgcgatccttctggggggagtcgaataatccagaatactttgtaataagctctttaatcttatgtattggtttttatctccactcatttgataaaatcgtaataaaggagagaaagcgatgatataattacctagaatatgaataccacttgaaaaatgagactgatcctctatcaacgggtggcgcaaatagtccagcagataattctgctcaaaattctttctcgtagccgccagattattgtatggtttagacgaataccgaaataccagcccctccgaatagaggctgtctttcatctcttccaataaatctctgcggtagaaaaaatgcgtataatacacaggacgtttctctttttcggcaaaataccacaatccaggacatctcaccgtctttgcatccggaagcgtttgcacatctattcccacttcctgccataactgactctcctgagtaggattcctcaagtcggcaacatcgaccaccttcacatccgtaaagagtccgatgccgtattgcaacagatagcggtaataggtaccaagattcaagtcagagacaagtatggcgtctttctttaaaccggaacactcattataaaaatagaatagaaaggcatgggaaaacaatccgctgtcataccattcacgggcaagctcctttatcttgtccatatcttttttatggtgataataggtcagatcagagatatagtcgcgttcactggtacgcttgatagagagtatcttttgttgaattacttcccgttttccctcatcggtttccaaatccagcaaatgccgatagtaagtccgtgtatcaggaatccacttcttcattttcttcacgatgccatgttgttcccttcgcaatctttgcacctgcagagaatccttccaccacactaactttgcctcttgatattcagcattacaagcaacccaataattctcccatgccttttcattccgcttatctttctttaactcaacctgccaggcatccttctgcgcccgataccaatctgcccccaaaggaaagaaaccatccaacaaccggacttccaaaggttctgctttctgttcctgggcaaatacggtatgtccaagcactacgaaaaggagtaacatataaataagtcgtttcatgcttttctgagtttattgaagattgatgcttttctgatattgctcccgcacctccttactaaaagattttgcattgtcaatgacaaatttcagtaacaagtatagtttgtcataatgattcaagtctcctgattctttgtaaaactgtaacagagctttcaaagcaggtacataataaagactcaatgcttccgtcaattggggattaaaagctacagtcgccactgtctccggataaaaagtctcacgcaggtaatccatcaaatatacattctcaaaattccgccgcacgatcgccagattatcataagatttaggagaatatttcatcaataatccctcggagtgcaggcaatccttaaacgcacttctggaaagttcatccatcgtaatagaaaaatatacgggacggtttgtatgccggataatgtaatctacctgtctcttgattttcttggaatacgttttcataaaatctgtaggggagataaatccagtcgtatcattattttcttctttatatttagggattcccagttcttcggtcagtttatccatatacgtaaagctagacaagaaaggatacacaataatcttcttatcattaaacatatctttcgcattctgaagcattctggcaccgtataagtcaaggcttccacccataaagatgatagcatccttatctgccgaagccagctcgttataggcaaaattgagtatctgcgcaggaaattcaccggattgataccaacgtacacatatatctttgagccgcttctcatctcttaatgacatagacatgtaagtaggataatgcaaaatagcatcaggccatttatctataatttcttcgattggcattctcttttcacccggcttaatgttcatattccgcataacttcatacgtagcggtattagggatgctttgcttcatttctgccatcatttcatcaaactctttctgtatatctgccccaacagcaagtgtagcagatggtttcatcgaaagcaataaggatattccttttagtgactggagtttccctgcatactgcatccatgctttttcgtctttagggttttcctttactttctgtttccattggtctatctgctcacgcaaggaatttgcaaccatttcaatagagtcggaagacaactcagcatcataataagtagattcaacttgcgaatacaacagtgtagcacaagaacaaaacaggataatcaacagatatttgatcgttttcattattcactcttttattaaattcaacattgcttaattagaaccgttctgacaaagcatacacgcaagcaaagcaaacgttcaaataaaagagtacttttttttgcaggtgtttactatttgcatccacaacgggttcaacgtcccgtccaataatctattcatcactccattcaaagtccgataatcacctcacaaaccttatcctgaaacgccctcgccctggctgccgaaagcacattctgattcataatggcaaaagccacttcatgtccattcttcatcttcagataaccggcaagggcattgatagctgtaaacgaaccggtctttgcatggacatttctgaatgcggaagtattcttcattctgtttttcagcgttccgtctattccggcaacaggaagcgacttatacaatttctgaaaaacatcggattgtgaataggcatatttcagaaaatcgaccaacagggcaggagacaagtaattataattagacaatccgcaaccatccgcgatcttatagtctttcggatcgtgcccgaggttacgaaccagtttcataatctcaacaatgccatcttctgccgtcacacgcttcttccctgtagcttgtgacgcaatccggcaaagcattgcttccgcattcaagttatcactttccttcatcaactgattcaagaccttctgcaccggagtctcccagcgagccatctgctctgctccatcggacggtaattcagtaaaaccgtacgattcgggaaccacgattcctttcgcacggaggcgttcccaaaaagtatgcataaagaaactccctgaatcatagatgtttatcaaatcctttctaaacgtaggaacattgcctgtcacgatcagattattcccattggtcaaccaatctcttgataacaaatactttccggcagaaggagtacgtgtctttgtccggttcgtcaaggtataataagaagacacaggcttacaggaaacgcttgccgtatctccttgcagagagccgggaaccaccgtcacctccacagcacccttacaaaacatcaacggagacatataaggctgataagcctccggagtatcatcccatgcccatccgtgcccccaataaagggaatctttcatcgaaacatcgccatacacctgtccgttgatcaccgaaaaagggaaggtgattacttcttcgatcaatgaatccatcatcaaactgtcaaattccggatcgaatccaccgacaacatacaagttgccttgcagcgtatcatgctctatcaccccgtcgtgccatacttccgtacggaaaggattgtccgcatcgggacgggagagggctgtaatagccgtgagcagcttcatggtagaagccgggcgggagagtttcgtatcacgataagtatataatgacttcttcgctgtcaggtcatacacggatatgccgacttcggatgcttcgggaagcattcttttgattagtgaatcaatctgagaaagatttgcctgcccccatacggatgtgggcaacagggcaactgataaaaccaaaaacaacaaatacttcttcatcaaccttctacattaacctacattaactttcatgctacttcagcttcttccgtatctcgaatatcacggctatccgcttatgctcaatcttataatgcttcccggaaaatctctcctaccgtaggatgagggaaaacaaccttcttccatgcggcggcagtcaatccaagctcaatggcagtaccggcaagagtgatgatttccgaagcaggattgcccagcacgtgtgctccgattatccgttcctgttcatccagcagtactttgcagaccccgttcacgccttcattctccgccacaaaacgaccggaataagccatcggaagtttcaccaccttataagtaattccttttgctgaggccgattcttccgtctctccgactcctgcaatctccggattcgtataaacaacgccggggatagcccggtaactcattgcatcttccttacccaaaatagaatgtacggcaacctcagcctcacggacagccgtatgagccaacaaagaaaagcctgtcagatcaccgcagacataaacgccggacagcgaagtctgcatcttctcattgaccttgatagcgccacgcccggttttatccagattcagattttcgagtccgaaacctttcgtcacaggtcggcgtccaacgctcatcaatagcttttctgctataacactgccctttccttctgcattctcgtatgaaacaaccgcaccctcttccgtctgtgataaagcgacaactttagtgctgagcaggaatttaatgccccgcttcgcatattcggcacgaagcaatgcagacagttccttatccattcctcccaaaatctcatccatcatctcaatcaccgttacctgcacaccgagactattaaaaaatgatgcaaactccataccgatcactccaccgcctacaatggcaagggaggcaggcagctccttactgtccagcgcatcccgatgcgtccagtaattcaccgtttccacgccggtaataggagggatgaaggtttcggagcctgtacaaaggatcagattttccgcattgtatgtttcttcgccacagcgaactgtatttttatctatgatctgcgcctctcccgtcaccatcgcgacattattggaggtcaactttgcctttacacccaataccagtttgcgaaccactttacttttacgggcaatgatcttcggcaagtcaaaagagacttcggagacattcaccgcatatttcgaggcatgacgtgcactgtcgtaagtctttgccgaatacaacagcgttttcgtcgggatgcatccttcattcaggcagacacctcccaaattattcttctcgataaggagtacactcaaaccggctttgccggcagcttcggcggctgtatatcctgcgggaccgccaccgatgataatgacttggtatttcataggtataaaatttattgttccattctctttttaatcaactccacaaattcacgttccttgacaggcatcaccgaagcaaactttccgtttccatactctatcaagacataattcgtcaccgaaaactttccgaatttcatggaatgatacttccggatagctgtgatttcggcaataggaattacttttttacgcataaaacgtccggtggatatctccagaactccatcagtagatacagtgtaaaccgtatgaataatctgttcgatgactacaataagcaggagcattagtagcactgccggcaagatatatttacaccacaaagcgcccacggcatttacagtaagcaccaccagcagaaaatactggtaccaggcgatgcgggcatgaaaaattcgattcattttgtcagatttttgcgtgcaaggtagcaaatttatgaattagtgacaacgaaaagaacaacgaagtgacttattttgtagctttgcggtgagaaataaacaaaattatggtaagaaaattcgatttcctcgttatcggctccggaattgccggtatgagttttgcgctcaaagtggcgcacaaaggtaaagttgctcttatctgtaaaagcgggctggaagaagccaatacgtacttcgcacaaggaggagtggcgtccgtcaccaacctgctggtggataatttcgacaaacacattgaagacacgatgattgccggcgactggatcagtgaccgtggcgcagtagaaaaagtagtgcgcgaagcgcctgcgcaaattgaagaactgatcaaatggggcgtggacttcgacaaaaacgagaaaggcgaatttgacttgcaccgcgagggaggacactccgagttccgcattcttcaccataaagataatacgggagcagagattcaggacagcctgatcaaagccgtgcaaaggcatccgaacatcgaggtgatcgaaaaccagtttgccgttgaaatactgacccaacatcatctgggggtaaccgttacccgccagacaccggacatcaaatgctacggtgcctacatcctcgacccgaaaaccggaaaagtagatacctaccttgccaaagtgactctcatggccaccggtggagtaggagctgtttataaaacgaccaccaatccgctagtcgctaccggagacggtatcgccatggtctatcgtgccaaaggtacagtgaaggatatggagtttgtgcaattccaccctaccgccctgtaccatccgggcgaccgcccttcgttcctgattacggaagcgatgcgtggctacggtggcgtactccgcacaatggacggcaaggagttcatgcagaaatacgatcctcgtctttcactcgctccgcgcgatatcgtagcccgtgccattgacaacgaaatgaaaaatcggggtgatgaccatgtttatcttgacgtcacccacaaagacccggaagagacaaagaagcactttcccaatatttacgagaaatgcctcagcttgggcatcgacatcaccaaagattacattccggtagctccggcagcccactatctttgcggcggtatccttgtagacctgaacggacagtcttctatcgaacgcctctacgcagtgggagagtgctcctgcaccggtcttcacggcggtaaccgcctggcttccaactcactgatcgaagctgtcgtatatgccgacgctgccgccaagcatagcctgagagttgtagaccagtatgcctacaacgaagctatccccgaatggaacgacgagggaacccgttcaccggaagagatggtactgatcacgcaaagcatgaaggaagtcaaccagattatgagtacttatgtaggtattgtccgcagtgaccttcgcctgaaacgtgcctgggaccgactggatatcatttacgaagaaactgaaagcctgttcaaacgcagcgtagcctccagagagatttgcgaattgcgtaatatggtcaacgtaggatatctgattatgcgtcaggcgatggaacgcaaagaaagccgcggattgcattatacgattgattatccacacgctaaaaaataatcatgaaaacattaactagactatttattcttttattcgttatggcaggtgtaagttcctgctatacagggatcccattgaagcaaggcaaatcggaaaacaaccgaacttacgaagtcagctatttgttcgagcatgacggagtcaaagtctatcgttttatggatatgggaaactatgtgtactttacaacaaaaggagatgtgaccagtatcaaaaatgactctacgaaagaaaggactgtaacgatctacagagacgataagttcagataaaaatatgtcttaataaaatggcgcttgcatatgattgcaagcgccatttttattatctaataaacacctcttattaatagttttctttcttaacctcgaaatacgcctgcggatgcaaacatgccgggcaaacttcgggagcttccttaccgatttcgatataaccgcagttacggcattgccataccacttcgccttctttagcgaatacggtcatattttcgatgttgttcatgaaagccaggtatctttcttcgtggcctttctcggcgattgagatattgcggtacatagcggcaatcatcgggaaaccttcctgttctgccacatcagcgaaatgaggataatccagtgaccattcttcatgttcgccggcagcggcagcgcgaagattttcgagtgtattaccgatcacaccggccggatagctggcagtaatttctaccataccaccttccaggaacttgaacatacgtttagcgtgttccttttcctgatcagctgtttctgtgaagattgctgaaatttgttcgtaaccttccttctttgcaacacttgcaaaataagtgtaacgcattcttgcctgtgattctcctgcaaatgaagtcagcagattcttctctgtctgggttcctttaatacttttagtcataattctaatctatatttaaattggttattaccaaacgtaacttgtcgtactatttataacgcaaatataagcgatttgttcgtaataagctcccttttcttgatgaataaaaactatcgattcatagataaaacctatcaacaatcaaatagcatgttgctaaacatacttatctcgattattttgcgtaattttgcaacctctactttgcaaaagagcaaattatatataataattcacagaaatgaagttatttgaatttaaacccaaattggtttcttgtttaaagaattattcgaaagaaacgtttatggcggacctgatggcaggcgtcattgtcggcatcgtagcacttccactggccatcgccttcggtattgcttcgggagtatcgcccgagaaaggtattatcactgctattattgccggattcatcatctctctgctgggaggaagcaaagtccagatcggcggaccgacaggagctttcattgtgatcatctacggcatcatccagcaatatggcgaagccggactgattgtggcgacgcttatggcaggtgttctccttatattattaggagtgttcaagctcggagccgttatcaagtttattccgtatcccattatcgtcggtttcaccagcggtattgccgttaccatttttactacgcagattgccgatatcttcggcctgtctttcggaggtgaaaaagtaccgggagactttgtcgggaaatggatgatttatttccgtcatttcgataccgtgaattggtggaataccattgtaagtattgtcagcatcattatcattgcaatcactccccggttttctaaaaaaattcccggttcgctgattgctattattgtagtgacagtggccgtctatctgatgaagacttatggcggaatagattgcattccgaccatcggcgaccgtttcaccattaagtcagaattgccggatgccgttgtaccggctttggattgggaagctatcaaaaatctgtttccggtagctatcactattgcagtgctgggagctattgaatcactcttgtctgccaccgtagccgatggtgtgataggcgaccgtcatgattccaacacggaactaatcgcacagggtgcggcaaatatcgtagcgccattgttcggaggtatccccgctaccggagctattgcccgtacgatgacgaatatcaacaatggaggtaagacgccgattgcaggtattatccatgcgattgtccttcttctgattcttcttttcctgatgccgctggcacagtatattccgatggcttgccttgccggagtactggtcatcgtatcttataatatgagcggctggcgcgtcttcaaggctttactgaagaatccgaaatccgatgtcaccgtactgctgattactttcttcctcactgttatcttcgacttgacagttgccatcgaagtaggactgatcatcgcctgcgtactcttcatgaaacgtgtcatggaaactactgaaatctccgtcattacggatgagatcgacccgaataaagaatcggatatcgccgtcaacgaagaaaacatcatgatccctaaaggagtggaagtatatgagatcaacggcccttacttcttcggtatcgctacaaagttcgaagaaacgatggcgcagctgggagaccgtccgaatgtacgcatcatccgtatgcgtaaagttccgttcatcgactccacaggtattcataatctaactacactttgcgaaatgtcgcagaaagaaaagattaccgtcattctttccggagtcaatgagaaagtatataaggtactggagaaatccggattctatgaattgctgggaaaagaaaatatctgcccgaacttcaagatagcgctggatagagcggaagaagtcatgaaataaagagattccaacataaagaaagagccattttatctcctgcttttcgggattaaaatggctctttttattttaagagaggagagattaccgctccactaaacttttaaaaacaagccacgtttatacatcattctcaacaggaagaaaagaataagataattagtaaaagtaagccatacgggataataatctccgatgtattgtttcaacccgtaactgaccgaatcagcaatgcaacggaagttcaccacttcgcccaacagataagccgtgatggaattcataccatacactttcagccagttcaacccgcggctgtgtcctttatagtcaatccaataataaaataatgccatcaacagaaagcaataaccaccggatagtaatgtcatactacctgtccacaaacgcttaatgatgggcatctgcaaactccaaagcatcgccagccctactaaaagcacaccaatgaccgacagagtctgtaccacctttttacggttcgctttcccttctttcataatctttccggcaaaagctccgagcatgacagtcactccgaatgtcagactgctccatatccatgtgtaattgtaataaggtgaaaagctccacgttccgtcttcattccagaaaacaccatctctgaaacgacctaagacacatctgtccacctgttcggcaaagtttccagccggtgtgaagtcacccaaaaatgtcatgggaatccagtatatgaaaagcaacaataaagtgattcctatctgccacctgaatgaaaaatgtaactgaatgactgccgcaatgagatagccgacagcaatagactgcaaagtatttgaatagagataaatatgactgctgtccagtccaagcagatttccctgaacaatcattccgaaaataaacagcagaaacacccgcctcagaatcctccgatagacgagccagtaactgccggacataccgacgtactttgacagtgaaaacggcatcgaagcgcctgtcataaagaggaacaacggcatcacaagatcccaaaaacggaatccctcccacacttcatgatcaaactgataaaggatatcattgagaaacggcaagttcaactgtcgtaccaacgccgcaaacaccggctgaaagaagacaagaagaaacaggtcaaagccacgaaggatatccaacgatgccaaacgggttgtgtttttctcagataatttattcatcgcatttataaatttaagttttcatcactcttccttacttcacgggataaatggtgaaagtaaatgtttgctttcccaacggaaccagatacggcggcaacacccccggtccgcatgtagcagtacctacacctgcctgcttagcatccaaatgtacggtaatcctgccattacgttccaagtcattgatatgaagtgccttctccaataataaatcagagaaagggagagcactaaactggaatggagaatcagactctatccagcagccttttccgctgtcgtctgccagcttcacccaacgtacatcggtgcggtttcccgtcgactgggggataacataataatggaacatcttttcgggcgttgtagtatagatacctattttaccagactggtttctgtcaatgtatgtttcgtgttcaccacgtcccagataagtcacatttccataggtatcgttcatttcaaacgttaatcccagtcgtgctattgatttcacccatgtcgtgtccggctgaaaagtagtctgtactttcaaagatccattgtgattcagcgtatattccaatgtggcatctcctactttcttcccagtcacattcaatatatttacctgtgcggtagcggatgtcttactttctttcagagaaaccaccttttgggtcaatgtatgcaatccggcttttctccatagttttgcacccattctgtcccgattatcattatccgttgccggacggaacaggcttatagtgaccggactagccaacaactcttctccgtccagacaaagagacttcaaagcgcctgtgttttcatcgacttcaaatgtcgtttttccggcttcagaaggttttccattccatacttttccggatgcaggaagcacaaactggtcataagcaatttcccaagcggtgtccactaaaggagtggactttttacgtgtccagcccaaatcaagataagcttcacggatagtcttgggaagctgcaccgcccctaaagtaagctccaccgttgcatgcggctcacatgccacctccttgttgccttctgccaaaacagtaccatcatctcccgtcaccttccaatgcaggatatattcattcaaatcagagaagtcgaaccagttcttcacacgaaccgtcagattctttttatcaatcagtgtgctctttatattctgatagatcttctttacttccagcaaatgcggatgaggttcccggacagcatttaccaacccattgcaacagaagtttccaaagctgggcacatctttcggcccgtaatctcctccgtatgtccaataccatttaccatccttgtctacttcacggaacgactgatctacccagtcccagatacaacctccttgtgccatcggctcattttcgaagacctcccagtattctttcattccgccgcagctattgcccattgcatgcaaatactcgcaaagaatgaaaggacgataaatatccttgcgtgccacataatttctgatcacatccacactgcgatacatccggcaatagatatcggtattatagttttcttccgcacgttcgtattgtaccggacggtttttctccaccgatttcagccagtcatacgtacgttcgaaattgattccgttgccggcttcattaccgagcgaccagatgacaacagagggatgattcttcgaacgttcatacatacggcgtgtacggtctatatgggcaggaagccacgtactgtcctttgcaagagaggcaggaccataacccataccgtgcgattcaatattagcctcatcaatcacataaagtccgtaacggtcgcaaagctgataccagtagggatgtgccggataatgcgagttgcgtaccgtattgatgttatgctgtttcattaacctgatatcctgttccatcagttctttgcttactgtacgtccgagttgcgaatgttcgtgccggttaacacctttcaccaatacaggcacaccgtttatacagaaacgtccgttctttatctcagaagttctgaacccgacttttgttccggttatttccgtaacctttcctccggcatctttcaactccaacaacaaggtataaagttcgggatgctccgcattccatcttctcacatcaggaaggcgctgttcatcgaatacgatcagattgcccgatccatgtgattccagcttccggcttccttccagcactgtcttgtccgaagcatctttcaatgtataagcaatggaggacgttcccgaagccgttcctccgactgccacctccagttcgaagataccctctttgtaatgttctttttcgagaagggaagtcaccttgtaatcggcaatatattgttcgggagtgctgtaaagatacacatcccgttcaataccactcaatcgccacatatcctgacattccaaatatgctcccgaactccagcgatatacttcaagcgcaatcgtattttctccgtcggtgagcttgtccgtgatatcccattcggcagcagtcttggaaccttgattgtatccgagaaactcaccgtttacccatacataataaaacgatatcactccttcacagcagagtaccacacgacgtccttcccatccggcaggcactttaaaagtccgccgataagaaccgacctcgttctctttgtaaggtaccaaaggaggattctttttgaaattaaacatcttatcatcaaactcgtacgtctcattcacataaatagccgtaccatatccctgacgttcccagtttcccggcacctttatatctgcccatccacctgtatagtacgacggcttataaaaatcttttggacgagtgtccggattcttcacccaatggaacttccactgcccgttcagactcatataataaggtgactgctcgaatgtgcctttctccacctccgaagcatctgcataaggccatacataagtatgaggatcgagcttgttcaatcctacggcatactggctctgccattcaggctgttgctgttgtgccgtagtggaaatgatagcgggcgccgccagcatcattaagaaaaatggtttcaacaaattattcatttttatcattctatcatcacttcatcaaaatgcactcttgcctcctgcccgggacggacatggttatcaggacattttcctatcccttttgccgttacccttatatagcgggtttcaacgcctcccaaacttatcgatatatcctcaatataattaccttcacggaaaatctcttccggagtaaaggtccgttctcctgccttatcgaaagttttattatcaccggataccgcaatctctatcaagcgcggtttatgtacagccataccataactggttatgcaaccaatagtgaaggtattcaccttctccatcttctccatatctatagtaaaagagatagaatcattattcgtccaagaacaccattcaaagtccgaatacttcaggcttccacgtatcccgttagtcagaagtttctcattcggattacatcccgacacaggtttggcggttgccaaattccaacgaacaggaagcgtcagtgtctttcccatttgtctgcctttcacaaaagtagcacttttaagattcaatgtctcttttacggccaatttttctttataaagaggtgaagtagctataggttcactgccatctgtcgtataatgtatttctgcatccggccggatacattccagtttcactttcagtgctccatcttcgggagtcaccgtgtgctgaatattatacatcgaacgggcatagacaattccttttgccgtcagatgttcattataaatatccattgctttcagaaatgaagtccaatcctttttctccggctgtgtccatgctatctccgccaatgcagccagacggggaaatactaaataatccacgtcttcaggtttattgcagaactctgtccacatggatgcctgcacgcccatgagtaaagaagcgtactccggcttccagtctgcctgcaccggttcataatcataaatatccttcaacgtattattaccaaagtaggtttgaggttcaaaccattgcggtccctgataacgaatcagatacatgatacgtgcgggtgtcatgatgaacggatgcccttgctccgctgctttcagagcagccgttcccagtcctctccatccctggatgataacgccttcgggcaggaaactactgttggtcagttcgtcccagccaatcacttttcgtcctttgctgcacacgtagtcactcatccgtttcataaagtaaccttgcaagtcttcttcattgtccagatgttcatttttcatccgtgcctgacaaagcgggcacttttcccaatatcctttttgcgcttcatcacctcccagatggatatagcgggaaggaaacaaagccatcacttcatccagaacattctgcaaaaaagtaaaggcactatcttttcccgcacagtagatcactcctgaattgcctccacccaaacccgggatcaccccgatataactctttactatcggacaggtcaattccggataagcagccaatgcagcattactatgggcaggcatatcaatctcgggaataatttctatctgccgttcggcagcgtaagccaccatctcctttacatcctcctgtgtatagaatcctccgataggcgtaggttctcccggttccggattgcgccggaaatagaaaggaacatccatacggttgacccgccaggctcctgtttccgtcagacggggatatttcttgatttccagcctccagccgttgtcatccgtcagatgaaaatggagagtattgattttgagcatcgccatacaatcgatgatacgcaaaacgttctctttaggaataaagaatcgggcgacatccaacatcagtgcccgataaccaaagcgtggttcatcctgaatagtcactgtgggaatattccagtcaaggcactttgcccgttgattgccttcgatagcaggtggcagcagtaaacggatcgtctgcaatgcgtagaaaaatcctttcgtatcggaagctttcaccaaaatctgctgcggggtaacttccagcaggtatgcttcactttttagagaagagtcagtcgtaaaacgaacatgactcttctcactgctacccattgtcaactgaggaattatccctgagctttttttaaataagtctataaagttacgggcgataaccgcctgttcatggttttctacggaaaagactgtcttgtcggaaaaggtaaagttacccttgcccggtactacacgtaccggacaaggaactattgaaataggggatggtgttaagttatcagcgcttgcccccgctataggtgccagtagcatgagaatgattaagatgtatttcgtcatgatagtcagttttattattattccttgtctctctcaggggagaaacggaccggatcattatactgttcctgcagtttttccatttctactttcagttcttcggcgatggattcatattcgggttgaccgtaaaggttgtgcatctccgtaggatcagcctgcaggtcgtaaagttcccaccagttgatgttattataaaaatgaatcagtttatagcgttcggtacgtatgccgtaatggcgtttcaccatgtgttcggcaggatattcatagaaatgataatataaggctgtccgccagtcctgaggatgttcgcctttcagcaacggaacaagtgacactccgtggatgtcttcgggcacaggagctccggcaagttcgaggaaggtaggggcatagtcgatgttctgcaccatttccgtgatctttcccctgcggtcaaagcctttcggcaggcgcatgataagaggagtacgcatggactcttcgtacatgaaacgtttgtcaaaccaaccatgctcacccatgtagaagccttgatcggaagtataaactaccagtgtattgtccagtaatcccttctttttcagatagtcgaatactctaccgacattgtcatccaatgatttcaccgtcttcatatagtcgcgcatataacgctggaatttccagttggcaagttctttcccctgcaggttctgccggtagaaatcggctatgatcggatcataaaacttatcccatgcggcacgctgtgctttgtccatccgtccgatatacttttcatacaaggctttcaggcgggagtctttatcaggacgcagcattttaagatcgtagatcatatccatatctttggcaatgctcatttcctgtgaggcggcagccggacgtccctcataatcgtcgaagaaattatccggtaacgggaaggtcttatcttcatacaaagccagattacacgtatctgccaaccagttgcgatgaatcgctttgtgatgaatcaacaggcaaaaaggtttatcaagatcacgtttgtgttccatccagtcaatggcatcatcggtaatcagatttgtgatatatccgtgcttccggatggtgtcgttgttctgtgtaatgaaatccggattgtagtaatcgccctgaccgggaactatttcccagtagttaaatccggaaggaaggctttcaagatgccatttgcctaccaatgcggtctgatatccggctttttgcaacaatttggggaatgtctgttgagcactatcgaatacacaagtggtgttatcatagaatttgttggcacaactgtgcttgcccgttatcatgcaggcacggctgggtccgctcagagaattagccacaaagctgttggtaaagagtactccttcttccgctatgcggtcaagattgggagtttccatatatcgggtatcatagcaactcatcatttgtgctgtatgatcatcggtcatgatatagacgatgttcagtggcttctgtgcagcctctttttttaccgaagtacaactacaagctgcagcagccaatccggtgacaggaattatataagtatacttcattttatttattcattgatttaaaagaaatcatccggagaatacttgcgggattccccggatgattgataatacggattattgattaatagaacttagtaccatttttagctttacccagttcataatctgctaccgtagctttattgatgtatgtacgaacccaatcaatctccagacgagggatagcgtcgttttccttatctcgctcataattattgtaacttgcgaatccggaatcccagccggcatcaggagaccatactccgcctgtttctgttccaccgccaagtccccatttattaggtgcacccatagtgaggatgaacttaagtcccttctcattctttgcattcgtaaaggtccactcctcttcggtacattcgctcttcttcaaggttacggtttcttctccgttgatacctattgcaacttccgtatccgaacgccactctacccaataaatattccattcagtcatattgattgtattattagcagttttggttttattatcagttgtagtaggaccggtatggaatgtctgatgtgctctgtctccggttacaggaccgacaggattttcaagaatatctatttccgaataagatttctgaccggcagattcatcagaaaccagccagatacccatattaaagccattcttctgcccacgaagacgggcacggatttccattctgcaaccttctgatatcaactgactgttggacttccacggagaacccgttccacaaccatagaaagctgctgtaccataatctctttgccctgatgcaggagccgtagcatttgacggtactttcatttctatcattcgcagatagccgtcgtccgtaatctttgagaactgttcgtttatacaagcagcatggttctgaacgatcacggtattacgtgccgccaggaacagaggtactttattaccaaaagagttgccattgttccacatgtcgcccgaatttcccacactatggaattcccacgcattatagaatttccagcctgctgcagccaagtccgcattaggatgcgcatccaactccttcattaaaacagcatcgccatattgctcaaccacagccgtctgccttccactggaagcaaacgggatccccggatgatcatatacccagcgttcgtcaagaagtttactaccctttcctgcttcgaggtctttcatgatgatttccattttatcattatccagcggatacataacagaaatagttgtaaaattcagtaccaacgtttcgtgctgtgtaggactgaggttatgtttcgtcttcacttttgcctctgccaaagtttcacctgcgtttactgtcaatgtaacaggaggcaacgtttcatagagactcttttgatcatcaggaatagtgatgttaatatccatatcgtctttcaccggaacaggagtctgcacctgaatagtaaactcatcaccttcattaattatattatccgaattgttcttcagtgacactactgtataatagtggtcggagaccaccaccgtttgagtaggattagtcatggcatagccacgcacgaaggcagtcacgttcacagttaatttctgtttcggttcaagaccactttccacaatcggcaatttaatatcgaagctactcacccctttggggaccgtaaccatcgaaggaaaatctttaaatgcgattttcgatacatccatttccccgtctttagcggtcagatacacatcaaaatcttcattagtcgtcaattgcggattcttttcatcattaactttgacggtaagagtcagttcttctcccatcacaaagctttttccacttgcttctataatcaacggtacagtctccggcaatggttctaccgcatcgtcatcacaacctgcaaatcctgttgcaagcaggcaaacgggtaaaaatgtatataatattctttttatcataatagtatagtttataaaatgaggtatttattcacttacattctcccaacccggattttgacgtaactggcgatttaattgtagttcatcctgtggaatcggcaataaatagtcccgtttcagatcgaaaaggtatccattaggcaagtattgctgcaatgggtccatccaaccctcattatccttcaatacgagctttagtgactcttgtccctcgggtgaaaaactccggtacagaatcccctctttacccagataggcacctctgccgcggccatctattcctttcagagttccggcacctgcccaacgcatcaaatcatccagacggaacccttgaagagccagttccgaacgccgctcacggcgaatctcctgaataacaggactaattcccgtaaatgggaaattgggatcggttgtcggagtaatatatttcacacctgctctttcacgcaacgcttttatcgtttttgcggctacattatcatcatatttattgagttctgctgctgcttccgcatagcagagcaatccttccgcatagcggaacataataatggctgtttcactgttaccgtctacataagttgtatcgatgcccatccgaatatgaaatcctgtaacgtttttactgttcccgttgccattcaaactcggagatacgatatcatcattcttcagttttatttcttccttagtacctgtaggatcataagctctgacgttcattggcttagaagcagtagctcctgcattcgagcgatatttacagcctgtatgcatcactgtagcaagaagccgcgcatcccgatctttaaacatttgattgaaatccttaaatttcagttcagcaggatcaataaaagtaccatcggtatacaaataattatcaaccaaagattttgataatcctgccgggccgtcggtattgaccacaccactggaaagtaagcctcccaaagcattgaagataccatcattcaaagagtactttttccagaaaacagcctcttgaatcccagagagatctttcttattaaacaaatgtgcaaaagcgtcttccgcactgatagcttccttatcagaatcctttgtattcaaggtcagaccggcagggaaaagttgctgatcaccccagttcaatacttcctgataaaattctgcggaattatcctctttggcgaactctgttcctttgtgatatttttcccatgaaccttcgtaaagcgctacccgcatagcgagaataatagccgcctccttgttaatacgcaatccttgatatttactacgggaaaacagacttgcccgagtttcgggaagctcgcctatagcagccttcagatcgctcagaatgaaccgtgccacatccgaacgcttagtagccggaatttgtaaaccggcaactgtggcattcccatcccaaaaatcatccataataggtatatccccaaagcgggttagcaaataaaagtgccagtaagcccgtaagaaataagcttctcctcgcaaagattgtatctcggctgtttcctctatttcaggaacacaataatagtagaagaaatagttgacatcacgcaggttctcataccccttcttccagtcggacgagccgctgaacaaattattttcaccattcaggcgcatatcatacttttccgccagaatattgtcgctgttcacctcttctcccctgacacccattccatactgtgccggagcgggcaatgccgggtataaagcattgatatagttctctacctgttcccgtcctgacaggaaggtagtgttatctggctgcgtcaatggtttccggtccagaaagtcggaacaagcagacagcatcagtcccataaaagcagttagaataattatcttctttttcataatagttcctctctaattaaaatgtgacatcaattccaaatacaaagttccggttcataggatatacacgtccgttaccattggcattcaatggtgaagtaagtgccggggcagtgtcattactgccgcctacccatccgttcacctgattcagtgtttccggatcaaactgtttcggcaatttagaaacagtaaacaggttatcacaagtgacgtatactctcaaattactcagtccgatatgttgcaccagctgaggcttgaacgaataagacaccgtcagattctttaggcgcatataagctgcattcagcaagtaacgggtggtattgtagcctgtattggctgccagagtctgtttatcatccgtcagacgtggtaaatatccttcaggattctgagcattgaaatggtccagatgttccttgaaatagctatttccaccaaagaaataagccgcaccggagatggggaattgccgtttggccaccccttggaaaagagcagatacttcaaatcctttatagcctgcattcaggttgaagccaaaagaatatttgggagtagcgttaccgatcactttcaggtcaccgtgatctgccagtgtacccttgcccgaatcgacttttccgtcgtgatttgaatctatatatttcacatcgcctcgttgccacttatcacccggcttaaagaaactaaggtctaccgttttgaggtattcatccacttcacggttggttcggaagaggtcatcggcctggaatccccagatttcgccgatatccattccctcatagtaacctttgttacgtgccagaccggtatgattattgtaaagcaggccttcgggattattatatttcgtaactacagccttataatcggaaatattgaacccgataccgtagctaaagccacatttcagtctatcctgccagttgaccgataattcccagccacgattgcgcaaagttgcattatttattttcgaacggtcttcagtattaataccgctgatagaaggtattgcctcagccggaccgatcatatcgcgggttgtacgctgataaatatcggcagttacagaaagtcggtttctgaacagcatcaggtcaataccaagattggcattatccactttctcccatgtgatataaggactgatcattttaggtgttctggcaagtactcctttggacggagtatcacttactcccggcagtaaccaagagtcggtagaatcaggaaccagattcataaatccaagatagtcatacaatccggcaccattctgattacccagacgtccataagacacacgtagcttcaactgggagaacggaaggttccatcccttgaaataatcggtacgtgccatatcataaccggcggagaaagaagggaagaatccccaacgatgtcccggagcaaaacgggaagaaccgtcatagcgtccgctaaattccaggaaatatacctcctgatagttccagttcaacttggcatacatacccatcgtggcccagtgagtacggtcttcattgccggaaaggttaccattggcattggcaaacgagaaaatgtcactggtcagcagaccgtctttataggtataaccgtcagagttttcctgcagttccatctgaaaacctgccattgccctaaaggtatggtcgccccagccaaaaatataagaagagagtatattcggagaaagataatagtcgaaggcattcccacgggtgtaagatccccagcgggaatttttccagttcatacccggatatacgtatccctgcttggtcgacttatctatcgataactctccgtcgggtttttcgtaagtaggataaccacgtttgaagctattatcttccacatcgaaacggactttcatttctcctacaatatcccatccttggagcggagtgatggtagcggagaaagacatagcatcggaaatacggttttctacataatgtgattctttcagataacggaactctgaagcatcattatatttcgactcaatgggataatgagtcggagcattcggtatagtctgaccaatggttccataaaagatggtttggttcgccatcggacgcttcagaatattcaatgtcaggttgttgttgaagttgaacttcaaccatttattagcattaatctgaaatttcgtattcacattgtatttactcaggttatcatctaccttatccatcagaccttcctgataaatatagcctaaacctacataatagctgaccttatcagaaccgccggatatactcagattgtgggaatgacgaatggaagcatccttaaaataataatcaaaccagtcggtattggcatataccgcatcctttgatgatgcccagttggtcttattctgattaggttcgatacccggaaattccgtggaataaggattcttcataaacccttccatcttttctatgagtgcgtcagaaatctcgtgtttcttgccatcattatcattgcgttcgtttatataatgagcaaactccagagagttcatcattttgggcatattgataggtgaactgaagccgactgttccattgtaagagacacgtgttttatcctttccaccgcttttggtagtaacaataatcacaccataggcagcacgggcaccataaacagcagctgcagaagcatctttcaatatactgatcgtttcaatatcgttaggattcacattctgaaggctctgctcaactccgtcgatcagcacataaggttctcctttattaatagaacccgtaccacgaatattgaacttgatttcagcacccatttcaccgccgacaccatcagcgactgcatctgttgaaaaattcaagcctgcgacattaccctgaagggcactggtcaagtccgttaccggacgactggcgattgcttccgaacttaccgtagcaacggcagccgtaatagtgctgcgcttctgcttgtccatacctacaaccactacctcatcgagcacctttgcatcttctcttaatacgaaacggttaccttcaagtttcttcactttcacttcaagaggagaataacctacataagaaatggacaatgtcgtgccgactttacctttcagagagaaatttccgtcaaaatcggtcaaagtcccttctttggcccctttcaccatgattgtggctccgataatagattcaccactatcatccaccacttgtcctttaatcatttgttgctgtgcaaacgctcctaaagggaataataggaggagcatcagaagactaacaaaacaactttgttttttcatctgtttcctttttttcataatactacatttaataataaagattcatactttcactagctaacaataagtttcaatcttcgacaaaaatacaaccacagcataaaaggaaacattcaaaaatcatcaattaaaattcaataatgatcaaaagaaccctgtgcaatccgctaaatgatcattattgatagagaagtgatcaaaaacaaatgccaatagatggtgattcacttcccgtgcagtgacaaacaaactgttttttaggcaaaaacccgcattttttagaaacaggacgttttgcagccaatcaattgcaggcataagacagaacgttatcaatcattatcaagttaatagacagcacaatacaggttactatattctcaaagtattctcatcgtgatgagaaaaaattctcaccacagtgagaaaaaatactcatgcctatgagaatattttctcattgcagtgagaattttttctcatttcggtgagaatcgaagtgtctgtactaacctgctaatggtcaactactcatttactacacaattttattcatttccgagtcaagaaggagctaacaaggcatttttatcgatttttgaaagcctattgaacaaaattgaaaaagagtcagaacatggataaggaagaaaaggagtacttttgcacgtactcctttaaattaatttattatgaagaaactttattctttttttatctgcacacttttctccctttccgcatcatcaataggaactgttgattataccaaaggactctctgtctggttcgatactcccaacaatctcgacgggcaagctatctggctacgtgcttccggttcaggagccaatcctgacaaaacgtgggaaagtcgttcacttcctatcggaaacggtagtctgggagcgaacatcttagggtcggtggctgccgaacgcatcactctcaatgagaaaactctctggaaaggaggaccgaatacttcgaaaggagcggaatattactgggacgtaaacaaacaatcggcaggagtattaaaagaaatccgccaggcatttctggatgaagacaaagaaaaagccgcccaactcacccggaacaacttcaacggtttagcagcttacgaagagaaagatgaaactccattccgtttcggttcgttcaccacgatgggagaactttatgtggaaaccggactcaatgaactcagaatgagtaactatcgccgtatcttgtcattagattctgccatggttgtggtgcagttcgataaagatggagtgcaatatcaacggaaatatttcatttcctatccggacagcgtcatggtaatgaaattcaccgccaaccaatccggaaaacagaaccttatattgagctattgccccaacagcgaagcaaaaagtaacctcagggcagacggaaaagacggactggtatataccggagtactcgataacaacggtatgaagtttgccttccgaatcaaagctatccacaaaggaggaactctggaagctgaaaacgaccgccttatcgtaaaaggcgctgacgaagtggtatttctgctcacagcggacaccgattataaaatgaacttcaatcccgatttcaaagacccgaaaacgtatgtaggcaacgatccggaacaaaccacccgaatcatgatggaccaagcagtacaaaaaggatatgatgaactgtaccgtaatcatgaagccgaccatacggcgctgttcaaccgggtacggctgcaactcaatccggatataagcagtcccaacctccccacctaccaacgtctggctaattataaaaaaggaaccccggattatcaactggaacagttgtactatcaattcgggcgttacctgctgatagccagttcgcgccccggcaatatgcccgccaatctgcaaggtatgtggcacaacaatctggacggtccctggagagtggattatcacaataacattaatatccagatgaactactggcctgcctgctccgccaacctttcggaatgcacatggcctttgatagactttatacgcagcctggtgaaacccggtgaacaaacggcacaagcctacttcaacgcacgcggatggacggcatccatctctgccaatatcttcggatttacagcgcctttatccagcaatatgatgtcatggaacctgaatcccaccgcaggcccatggcttgccacacacatctgggaatattatgactatacccgtgataagaaattcctgaaagagatcgggtatgaccttatcaaaagcagtgcacaatttgcagtggaccatttatggcataaacccgacggcacttataccgctgctccttccacctctcccgaacacggaccgatagacgagggagtaacctttgcacatgccgtagtgcgtgaaatactattggacgctatccaagccagcaaagaactggggatcgactccaaagaacgcaaacaatgggaaaagatactggataaattagttccctaccgcatcggacgttacgggcagttaatggaatggtcgaccgacatagacgaccctgaagacgaacaccgccatgtgaaccatctcttcggattgcacccgggacataccatttcgcccatcacgactcccaaacttgcagaagccgcaaaagtggtattggaacaccgcggagacggagccaccggatggagcatgggatggaaacttaaccagtgggcacgccttcaggacggaaaccatgcttataagttatacggcaatctgttgaaaaacggaacactggacaatttatgggatacccacgcgcctttccagattgacggaaactttggaggtacggcaggaataaccgaaatgctgttgcaaagccacatgggatttatccaattgttgccagccttgccggatgcctggaagaacggttcgataaccggcatctgtgccaaaggcaatttcgaaatttccatttcatggaaagaagggcaactggacaaagcaaccattctttccgggtcaggaactccctgcaatgtaagatacggagataaaactctctcattcagcaccgtgaaagggaagaaatatgaaatcactttagtaggaagtctgttaaaactgctgtaaacggcacctatttcatcatatattcagcaaaaaccggctgaatatatgatgaaagtattatctttggtaaaccaaaccaaggatcaatgtgccaatctcagacgatccgctaacctacttttacatgaaaacaagattgcttactttaccagggattatagctattatactattgataactaccctccctctccgcgcagaacattactactataagcaaatctccctcaaagaaggactgccgtccaatgtacgctgcatcctcagagacgaacagggtttcatctggataggcaccaaagcaggactgggaaagttcgacggacatcagctgaagagatacaaacaccaggcaaatgatccgcactcgcttcttcacaacctgatctaccaaatagcggaagacaaacaacataacatctggatactgaccgaaaaaggaattgcacgctatcagcaacagagcaacaacttcactttccctacggacgaagaagggaattacattactgcctattccttctgcctcgttccggatggaatcctgttcggtggcaaagacagaatctataagtacagctataaggactcttcgctgagactccttcaatatttcaatgccaactcttttaaaatcaccgctctcagtgtatgggactcaaagacgctgctctgttgcagccgatggaccggcttatatctcgtggacctgcaaaccggagagcacagacgcccgccctttgactgcggaccggaaatcacaagtatgataaccgattctaaaaatagaatctggattgccccctacagcggtggactgcgctgctactcacgcgacggcaaactatcggcttcgtacactacccataactcctcactcagcaacgacatcgtattgagcctcgccgaaagagaagaacaactgtggataggaacagacgggggaggcatcaatatcctccatcccgaaaccggagaaatctcccaactggagtatattccgggccgtgagaactattctctgcctgccaactccattctctgccttcacaacgattacaacaacaatgtatgggcaggaagcacctgcaacggattgatcagcatccgggaagtatcaatgaaaacctatacggacgtagtgccgggcaacgaccgcggattgagcaacggcactgtacggagcctttaccggcaatcgccggatagcatctggattggcaccgatgggggaggcatcaaccttttcagcccgcacaccgaaaagtttacccattattcgtctacttggggagataaggtggcattcatcagtggctttacacccggaaaactactgatctcgcttttctccaaaggagtctttgtcttcaaccccgccacaggagagaagcaacctttcaccatcatcgacaaagaaacgactacacggctctgcaaccgtggaaagtccgtcaacttatatcaaaatacgcccaacaccgtgttattcctgggagaccacatctaccagtatcacctcaaagagaagaaattcagcaccatcaccgaagaggaagggaaagatattgtgggtacccttgtcccgttcgatcatcaagagaacctgacctatatcaatgatatcaaacatatctatgaactggacgaccagacctcccggctgaaaaccgttttcgaatgctacacggatacagtgatcagttccgtatcccatgatgaacagggacatttctggatcggaagcaatttcggacttatccactacgaccctgtcttaaaaagccggactcttgtccctaccaatctgttcaccgaaattaatatggtactgtgcgaccagaaaggcaaagtatggataggcgttgacaatatgcttttcgcctacttcatcaaagaacagaagtttgtacttttcggagaatcgaacggagccatacaaaacgaatatctccccaatgcacggttggtgaacgaacaaggggatgcctacataggcggtgtgaagggtatgctgcgcatcgacgggcaacttcttctgaacacatcggaaatgccggaacttcaattgctggatattaccatcaatggcgaatcggcgaatcatgaatggtacaaccatccggcaaaaatctcggtaccctggaacagcaatatatccatccgcatcatgtcgagggaagaagacatcttccggcaaaagatttacaggtatcagatagaaggattgaacaacgaatataccgaatcatacaatccggaactggtgatccgatcactgcttccgggaagttatagaatcatggcttcgtgcactgcaaaagacggtagctggattcccgaccaacaagtactggaactaaccgtacttccgccctggtaccggacatggtggtttagcctgacttgtgccgtactcgtttctatagcaatcatcgaaactttccgaagaacggtgaagcgcaacgaagagaaattgaaatgggcaatgaaggaacacgagaaacaaacgtatgaagaaaaagtacgtttccttatcaatatcagccatgaactccgcactccgttgacacttattcatgcgccgctcaaccggatactgaaatctttgtcttccgaagatccccaatatctgccgctaaaagctatttatcgtcaggcccaacgaatgaagaacctgataaacatggtgctcgacgtacgcaaaatggaggtcggtgagagcaaactgcttattcaaccgcatcccctcaaccactggattgagcacgtatcacaagatttcatcagtgaaggagaagcaaagaacgtacgcatccgttaccagctcgatccgcagattgaaacagtaagtttcgataaggacaaatgcgaaatcatcttaagcaatctgctgatcaatgcgctcaaacatagtcctcaggatacggaaataaccattgcctcggaattgcttcccgaaacaggaagagtacgtatctccatcatcgatcagggatgcggattgaaacaggtagatacacataaactctttacccgcttctatcagggaacaggagaacaaagtggaaccggaatcggattgtcttactcaaaaattctggtcgaacagcatggcggctctatcggtgcacaagataaccccgaagcgggggctatcttctttttcgagctaccgttgaagcaagaatcagaagagattatctgccagccgaaagcgtatctgaacgaactgatacttagtgataatctgaagcaggcaaccgataaagaaactttcgatacaactccatacaccatcctggtggtggatgacaatccggatatgacagactttctaaaaaagacactggaagagtctttcaaacgggtaatcattgccgctgatggggtggaggctctccagcttatcaaaagtcacattccggatatcattgtcagcgatgtgatgatgccgcggatgaacggatacgagctgtgcataaacatcaaagaagatattacgatcagccatattcccattatcttgctcacggcacgagatgataaacaaagtctcatcagcggttataagaatggagcagatgcctacctgacaaaaccttttgaagtagaaatgctgatggagataatcagtaaccgtctgaaaaacagggaatacattaagaaaaggtatttgcatacgggcataatacctgtcccgaaagagaccactttcagtcaggtagacgagagcttcttacttaaagtgaacaaaacaatccaggagaatctgagtaataccaatctggacattcagttcatttgcaaggaaataggtttaagccgtacttcgctttacactaaactgaaagcacttaccgggataggagcaaatgattacatcaataaattccgaatagaaaaagcacttacgttaattgccaataccgaaatgacatttacggaaatttcagaagaggtcggatttacatctcccagttatttcagcactgctttcaagcagtacacaggggagacaccgactcaatacaaagaaaaaacaagtaaaatataatatcatcataatctgaagacaatatttatcaaaaaacaaaaggagaaagcgaagttagagtaaatcgaccaaaatctgtcagagaatgactaaatagtattattccatattcaaattaggttgtaattttgccctatacctaagtgaagtatttgtcaaatcctaattaataaaacaatagtatgaaaaaacattttctgatttttacaatctcacttctatttttctcgcttgcacaaggcaaagtgaagctccctgccatgatgggagatcatatggtacttcaacaaaacagttccgttaagctgtggggatgggcagacggcaaaaaggtgactgtcaccacctcttggaataaccgtacttataaggtatcgacagacgatgagggagcctggctggtcaaagtggatactcctgccgggagttttactccttattctattaccatcagtgacgggatccgggtcacgctatcggatatattaataggagaggtatggatatgctccggtcagtctaacatggaaatgaccatgaaaggaaacatgggacagcccattgaccattcgctggaaactcttctgaacgcaggcaactatcgcgaccgtatccgttttatcactgtcccccgaaccaaaggagtgaaagaacggacagactttgaaggagcgaaatgggaagtttcttcgcccgaaaccactatggattgcagtgccgcaggttacttctttgcccgacaactgacggaaacgcttcatctccccgtaggactggtcatcaacagctggggaggttcacgaatcgaggcatggatgacagaagaaacgctcgcctccgtggaaggcgcaaatatagaagccgccaaaaatccaaagttagatacgaacagccggctgcaatgtctgtataatatcatgttactacctgtaaaaaactatacggcacgcggatttctatggtatcagggagagtcgaatctattcaactatcagatctatgctccgatgatgactgcgatggtgcagctctggagaaatgtatgggaaacaccggatatgcctttttattatgtccagattgctccgcacaaatacggaaacagccggaatataaattccgccttattgcaggaagcacaaatgaaagcattacagacaatccccaactccggaatgattcctacgatagatgtcggcgacgagttctgcattcatccccctcagaaaaatgtagtaggactccggctggccaatctcgcactgactaaaacatacggtctccataaattcccatctaccggaccgatgatgacaaaggtggaatattcaaagaacaaagcgatcgtcacactcgacaatgccccttccggactggcaccgggcaactgtgaattggaaggtttcgaaatagcaggagccgacaagaagttctatccggcaaaagcacggattgcaggtcgcacaagaaatgtggaagtatggagcgatcaggtcgcccaaccggtagccgtacggtatgctttccgtaattatgtaggaaacatcactttacgcaatacattggggatcgctgctttcccgttccggacggatacatgggatgatgtaaagtaagagcctgattagcctgtgtgcagggtatatatgtcctgcgtacaggagctatatatccaacgcgcaggagctatatatccaatatgttgggcatatagctcctgtatgtaactaataaattctatctgacgtaagtctccttttccatataataaatagcttctcctctatccccgttctccaaatctgtcagttctaccttaaacacataataaggcaaagtattattcctgtttttaggcatatcgactgtcaacagataggcatttccccactcgtcaggagcgaaatattcttttatctcttgcttcatgagtataggaactttttcaccgttgatccagacaacagctttcaactgttccggctcaggggccagaattgcttctttaggctttccggctttcatccatgcctgcgtacgtgtcagactcataggacggacatacacctgataagcaggtgttgcacccgggattctgaaagcacgcagtccataggcttccatacgatgatattgtatgttgagcgttgtgtcgcgatcggcgataaaatcccatccccaaaattccagtcgttgatccttctccggtagggtagaattggcgatgatgtattcatccatattcaatgcacccatcgaatgatattttcccttggggatgcgtatgctgtaatttccatttttgtctgtcagcgttaccgatacctcactgaagtccggacgtgcccaactgacggaaacattgtccagcggatgattatcataatcggtcacacgcccattgatcgttacagagtccgttattacttgagaagtttgagctaccaagctactattaaatccgattataagtatgagtaataataaatttgctttcattctattatttgtttgtgatgattatctttaactcctatacgctcactccttcgcacacattggtaaatgtataaaattaatctgaaagtctatctattatacgtatatttataacgtccaaataaaatagctcttaaagcaaagaggatgccaatagttccccacaggcatcctcttttgttatatatcaatgatttacacgaaatacatttagaatgaatgcatcctcagttgcttatcaaccaatattccgtctttcagattcagatcaaacttcactttacgtttcgctttcaatttcagaataaagagttcttccgaaccttccaaagcctcctgttttcccatattgacgaaagtaggatagagagatttcacaccattcgtatgcaggcggtcataagtcagattttccattgctttcatattcagcggttccacacctacaaattcatagtcgctctgatcataaggcaaagcaaagctaagtgcattaaccgaacgcagatcattacctttcacacggatttcaacgatttcgtccttctggtactgcttcttcggagtgctgatagacagagagccggatactttctccgtagctttcctgtcgacaccgccgtcgagctgagtggctacgacagaaatatcataagcatctatcaagtcattcatgttgatatcgcctttgctgatataaccttcaaagtctgaatcaccacgacgcaatccggtatagttcatataagaagtcaggtcattgcggtcgatcttgccatcattgttgatgtcgccttgcaggtaacttgccgttcccggtactttgaatacgtagatttcacgacctgaaccatagtttcctacacctgccgtaacgttcagtttgatgtaacgtgcatttggacgctctgtgaaagtgaatacttttacatcaccgtcccgctgccattcgaatgctccggcttccgtccagttttctttgtccatactgtaggatactgttcctttcagcagtgtaccgttgccggcatccgcacggggtagataatggaacttatccagttggttaactgttttgaggtcgataatcaaatctaatggtatggagttaacgttatacttcgtgtgccatgtatctcccgattcggagaagttgaacaatcggtctacaccgaatcctccctgcgatgcggcagtcgattcgccttcaatgccacgaatagcaaattccagcggattagtcttcgttttcacctgaatctctgcccattcggacacaccgtctttgttgacagcacgcactttgaatgcgtaaggagtatccgctttcagatcttcaaacagtaagtgagtatcccggatagtcgtataaagcattccgtcaaattcaatctcatagtaatcggcattgggtactttgtcccaagtcggttgcagggtatatgcttctctgttctgctcgcttacctgagcgttttgcggtgcagacagggttccgttgcttaccaagttccggtcggccggctcaaagcggaaaccttccacgtccagctcgatacgattggcggtgatgtcggtgctgcccagtttgatgtgcaacagcggattctttgtgataaccactttctcaaattcacttcctttggttgcaaacttattcagattgggggtttcttcgtaccagaatacgttttctccattcagaagttccgctgccgtgcttacttccgtcagttttactttcttgttgttgattcttgcagtcagtttcttcggtttctccgtgacgttgatgcgcagttccgtctttttatcttttacaaaaccgtcgaaacttccggctgtgggatgaatggtgatagtcacacggttctttgcgtctacgttcgattcgatcagggtagataccgatttctcctgacggtaggcttccgtcacaccgtcatcgtcatattctacggttgcagtatggcggttcggataaaattcatagatgcgaagtgaggggtctatttcgctgacattattgttaggttgtgtcatcggaataatagcgccgttctttacgaatacgggtaacttccagaccggagtatcgaagttgctgagaatacggttgccttcgtatttctctccgctgaaataatctatccaagtgccttcgggcagataaattccattgcggatatcattgccttctttatcagctttcgtattctgatagacaggggctacgagaaagtcggtaccatacatatattggtagcgggtagccgttccgtaggtatattcattcggatagtcgaggaacatggcacggatgagaggcataccatccaccgcttcacgggcaaagctatacgtgtaaggcatcagttccgatttcagtttgagatacatacggttaatggatgtagctggttcgcctaaagcatgggggtacttttcgttggcgccccagccatccatattcaactgcatgggggtaaatgttttccattggaaatcacgtatattgactgccgcattctttccaccgaagataccgtccatatccgagcagatattcggctggccggacagaccggaacctatataagtagggatatgaaaacggatatattcccattcgcctccggtctggtcgcccgaccagatgccggcatagcgttgtgtgcctgcccagccgtccagtgaaatgataaagggacgggcatcattgccataataaggcataatatgtcctacgtccgccactccgttcaatccgaaggaatagccggctcctacccatgccacgtcagttttgagtacacgcacaccggcatcacggacttctttcacgatgtcacgttgcaataaggcgcttacaccttccttcgggtgcaggtccgactgtgtccagagtcctatttccactccgttcttgcgggcatattctcccagacttttcagattggcgatgttgccgtccaacgtttccgtctgtccgtatccggctccgtaaccgtcgttcggcagtaaccatccgagaggcatatcatgattcttgtaacggtcgataacggcacgtgccgagaactgataattgttcttttcgccattcagagactccttgatgccgccattgtctttctggctttctttatatcgctttccgtcttcaaagaggattcctttctcgtcttccttccagtagtcacggttgtaggcattgagatgtccttcgtaaaaaccgaatttgggcaacaaaacggggtttcccgtcaactgatagaaatcattcaacagggaaacggctccgtcgttgaccatatagaaaatatcaaggtaagaagaattgtgagacagtttcactgtgtttttctctgttgctccaaagtcgtattcacctttccggaaagtgtaccacatcattccgtaaccattggtagaccagtagaaaggggcaggggaggccactccgccatccgtccagctattctgattttcgatggcaatgactttgcctttatgagaaaaacgtccgttttgcacaccgcctccgtagaagtattcttcgggattctccttcaaggttacggtcacttctttaggaccgaataccaccggagcgacttcttcgatcacacatttgccggtcaatggattaaagactttcatcagtccggtctgcttattcagttcaatccgtacttgggcggtagtgagggttatataaccctctttctcgtccactgacagtccggaaaccttgcgtcgaggctggtctacaagtatctgtgcttcaggtttcgcttcggggtcacggataatgcctccggaattgtcctgaaagacacggaaaatattctctccgtaaaagtcgatagtcatccgttgctggttcgcaaacagtacatcaaccgtcgtcgggtttattttttctgcacgaaggattcccaaagtctgttcctgatggacggatgccgaagaaacgtcactctgatccgatgctgcggatgcctgtatggaagaaagggaaatcggacataagaataaaatggcggtaatacgcctgagatgtcgtaaagagatgggggtttcttttttcatgtttttatttatttggtattagaaattaagactgttaatgtcagattgtaaaattactcgtttggtaataaatacacttcatctttgggttaccctaaatcagaagctgttttattattatttattcacaaatcccatagggataagcggaggtcaatagcgtgtcaccttattttttaaatctaatccgatatcttgtacaacaaatagcataattcacttatccatcaataggacgctgttgccggaattcccgttcgctttatcaattctacaatccggtccagttcttcatgagtggctttctgcaggtcatggtcgggagtctccctgtcaatcgtatagatcatcacttgactgggagcgatctccttgactgcttccagccacgggagcacaaactcatcggatgtattattcatatcttttccaaggtaactacctttcagaaacatagtctgaataatacaatttcctttgaattctttcatcttttcgatgatcttccttacggaatatttcccgttgggacgatccaggagatgaatgtattcttcgttcaccgtatccagcttcaggatattattatctatcttgttcaatgcatcgaatactgcaggacggtcaatgaaggtagaattgctcaatacacttacttttgcattcgggaaatagtggtcacgaagtgccagtgtatcttctatgatttccggaaaatgagggtgggcagtcggttcaccgtttccggcaaatgtgagtacatcaggggcgggaccgttcttctgcatatctttcagcttttctttcagggcgatgcgcacttcttcacgagtgggcagatgcttcttcggacgatggtcggcattgaagccgcattcacaataaatgcagtcgaacgagcagactttgccgtcttccggcaataagttgattcccaaagatacacccaagcggcgggaatgaacagggccgaagatgggtgaaggaaaaataatagtcatctttttattaattgttttaatatgagttcaatatcaatacgaacgtttatcacatcaaactcacattattttatcatttactatttcataatatccagaggcaaagatactttaaaacttaatacggagttgcatttgtacgtcagcttttttatttccaaggattaaatcattgccggaacctatttcattccggtcgagataaacggtttctccgaatttagttataaacatccaatgttcattcggttcatatctcagacgaacagcacagcgaaatccacggccttgaaaggaaggagtgtaaaatgtataaagcaatcccttttctgatacatatacccgcgaatcatagtcgtctgtagaaaaataactgccttgaacgtcagcaaacagcctggtccaaggcagttgggaggacatcatttgtgtaacttgatatcctttactagcagccctgtcttgagaatgaaaatggttgtaatctaaagttgtacgacagctaaacacatctccataaaaatagttcaaacgatatcgaagttggtgatgaaaaataggaagcgttaggttttctttgctacctgtcaagtcacgctctttctgtttataacgatatttcaagtacattgtcagattactgtgcggagtaaacgtagcctgaagcaatccgtccatacctcgggaaggtttactgatccggtatttcttccacgggaaagaaaacagatcgaaggaagcaaggatgtgccaatggcggaaaggggaagtttccatccccaaataatatccctgttcgttttgaaccgcacttccttctccaaaagaatgggcgaacatagtccaataattatatgagtagtatcgttgtacgatcatcaactgagttccttccaccggtgaatactgaagacggttcaaagtagcactgccttgttttcccatagccgtctctccttggaaagaaaagcgatgccagcggtaagcatagtctattcctaaattgtagaactgatttccatgaatgttgtattgggaataacctgttaattgcggttcataaggtcggttgaaaacatagtaaataccggtgatacccagccggatacgattctgttgataactcatgtttccaccagtcagctgcatggtgaatacgttcttcttatcggcttctttctgactgcggtgtagtccggttttgtagatagaagttatttcgccatcggtcagcacaccgtccagcgaacggtgtgagtaaaagccggatatactccattgctttgtaatgcttaaggttgccgccgctccccgaaaataattagtttcgtcagtagaagaatgtttcctgattcctccgctgcgggtgttgaaagaagaagcatatacggtctttcccagtaagtaatccgtgctgatcaccaatccctgtccgaaacttaaccgatagttaccaacagccaatgtttttaaccgcccacaatctttgagtaagagataaaaagaataataatcatacccttgacgattgtgcagagcaaagaaaggttctccggcatccttctccgcaacgaaacctgcatagagctggtcgcgataacggaaagcatacttaacagagttataaacagaaggtcccaaataggtatgttcataaccttttcgcttgtaaaacggtatatctatgcgagttatcacttcattctttccatacttcattgcgcttttcaacatagttttccaccgaaaagacgactcattgttaatagctttgatacatacgaaaggcaatagatactgaatagtctgcctgtccatatcctctatcaactgaagttcataaagagttttcatctgcccatgcacgtatatataggctagcagatgttcaatctgaatatcactgagaaaaggaaattgttccagttgttgacgggtagcccggtttaaatctacaggttcgtgaaggcggacggacagttcttccagttcattctcccaattgggttcattaacagcattatcaacactattattaacagataaatcttcaaaaatatcttctataagactttgagaagggttttgagcactacaagcaggaataatgaacaggctgtttataatacttatcaaccgaaatagttgagtagttttcatcaataaattatttgtttacaccttgcgtttttacagacaagggcgcaaagatactttaaataggttaacgtctaaaagaaatgtctgaataataaaattttaattctatttttgtaacgtgaaaaggagacttaacatagtaataatgatggcgtttgctatggtctgttcatcgaagatgcaggcacaggacaagcaaagcatcaacggatacttggttccaatgtgtatctacaacggagataccattccatgtgtccagttaaggactgtttatatcttccgcccgctaaaattcaaaaacgaaaaagaacggctagaatactaccgcctagtacgtaacgtaaagaaggtatatcctatctccaaagaaattaaccaggctattattgaaacttacgagtatcttcagacattacccaacgagaaggctcgccaaaaacatctcaaacgggtggaaaaaggactgaaggaacaatataccgcacggatgaagaaactctcttttacacaaggcaaactcttgattaaattgatagaccgccaaagtaattccaccagttatgaactggtgaaagcttttatgggacctttcaaagcaggattctatcaaacgtttgccgcactgttcggtgccagtctgaaaaaggaatatgatccgttgggagaagataaactgacggaaagagttgtgctgctggtagagaacggacaaatctgattcaccttgtcataaggttatcaacgtccttattaaccgtcatatttctattaaatccaattccactatcaccataagaaaattaccccactttatctgacttctagggtattaacagttgacttgtcaggtgttaatagtctgcatgacaagtattaacagttgagaagtcagctattaatagctgtgatgccatctgataacagcttgaaacaggatggttaataaacactgaatcaatcagactcaaccaagagtaagttgctacaatactctcttattatcccacataattatgaacagaaaaaaatagttggttaatagcaagttaactatgatatcaaccacttattaactaattattaaccgactgattttacaccgtcaacgcagctttttgaacaaatcccagatgacaatgcccgttgttacagacacgttcagagaatgcttggtaccatattggggaatctcgatacaaccatccgaatgatcaatcacttcctgttgcacccctttcacttcatttcccattacgatagcgtacttcttcgtcttgtccagttcgagtcgatccagcataatgctgccttccgcctgttctatcgaataaacaatatatccttctttacggaggttatcaacagcatcaacagcgttattaacatacttccagtcaacagtgaactctgcgcccaaagccgtcttatgcatttcggggtggggaggagtagccgttattccacacagatagatacactcgatacggaaagcatccgacgtgcggaataccgaacctatattatgcaggctacgaatatcatccagcactaccaccaaaggcagtttttctgcctgtttaaactcttcggcactgatacggttcagctctgttattttcagttttcgcatacgttgttcatttattacgtttcggttgcaaaggtagttcttttctgttaacagaggtgttgataacggtttaaaacctgtcaaaacaatcgggaaagaatttgaaaaataattcttgcattattcaaaagaaggtataaggggccttcattatgaacattccaaaaaacaaagacgaaactttctatgcagacatcaacatatttttcagcacttatctgcctgtttatatccataaagtttttaactttgcactttatcaacagggagttaatagtattctcccatttgatagggcttgcattgataatgaagataataaatagtcaatcttccaccttttcttccgttcataacggactcataaagcagaagtatggactaataacttatccggcaagaaaaatcgtatttatttgctaacactattaacaggctattatcactaacaaaggattttttttaaaaggaagaaataaaagaatattattatgaataatctcataaaggctattaacgagctgaagaaagaaaagaatgcaatcattctgggccactactaccagaagggtgaaatacaagatatcgccgattacgttggcgacagtctggcgttggctcaactggctgccaaaacggaggcggacatcattgtgatgtgcggcgttcactttatgggtgagacggcgaaggtgctttgtccggataagaaagtgctggtgcccgacatggaagcgggttgttcactggcggacagttgtccggcggatcagtttgcgcagtttgtcaaagagcatccggggcataccgttatttcgtacgtgaacacgacagctgccgtgaaggcagtaacggatgtggtggtgacttccaccaatgcccggcagatcgtggaaagttttcccaaagatgagaaaataatctttggtccggaccggaatctgggaaattatatcaactcagttacgaacaggaatatgctgctttgggacggagcctgtcatgtgcacgaacagttctcggtggaaaagatcgtggagctgaaaacgcagcatccggaagcactggtgctggcacatcccgaatgcaaaagcacggtgctgaaactggcagatgtggtagggtctacagctgcactgctgaagtatgcggtgaaccacccggagaatacgtacattgtggctaccgaatcgggtatcttgcatgagatgcagaagaagtgtccgcagacaacgtttatccctgctcctccaaacgatagcacctgtggatgtaacgagtgtagctttatgcggttgaatacgttagagaagctctatgagtgtctgaagaatgagtcaccggaaattaccgtagatcccgaaatagcggagaaggcagtgaagcctattcagcggatgctggagatttcggcgaagctgggattatgataggatatacaaacagtaccttccaatacattaaacggtaccttccaacatactggatggtaccttccaatacattaaacggtaccttccaacatactggatggtaccgtttaatgtattggagtgtaccattccgtgcgtcagatagtaccgttctttgagatgtaattatttcatttaaatttcattcatagcgatattagttttctgcttccagacggataacgaatccaccgccttttgccatatctatattcaatatagttttattatccactgttcttttctctaccatgtattctttaggttgctcataggagtccggagcgtctttaaagatagttgcctgataggagacattgtctttcaggaagctgaggttcacttctgtagaacgggcatcccaattggtcattccgctcacataccagtcattgcctttttgtttcgctgttacgatatattcgcttaactttgcttctaatggcaaggtcttatcccatactgcgggaactttggaaaggaagtcgagtacatccggatatttattgtattcggtgggtgagtcacataaataagccatccattggtcgtaaatgacaaacatggacaattcatgcgaacgtgttcccatactcataggcggagtattatctatatccatcggtctgaattcatcctgagtgacacttctcatggatcccggagtataatctgccggtcctgccaacaggcggatgaaaggaaaacgagtgtgatattcgggagttaacgtcttttcccagaagttacattccgctcctcttactgcttcatagttcagtatattgggatacgtgcgatgcaatccggtagggaccgggcaaccgtggaaaatagctaccatttgcttttcggccagacgttctgcaaattcttttccccatctcatggctatctggtcattccgttcgaaaaagtcgatctttgctccggatacaccatagctgtgcattttagcgatccagtcacttggattctctctggcacaactagcccatgtccagacgataatcttcacattcttttctttggcgtatgagcatagttctttgatgtaatcttcggaccatccggcatccaaggtcatatattcgatatgattttttgaagcccagtctacatagtatttatataactggagagaaagctgcttgtttccacaggggaagtcaacaccttccaaaacggctttgtgccaccattcccatgcactctttcccggttggatccaggaagtatcggtcagacggcaaggatcggccagtttgtataccagttcgttgttcaataatgatttgtcatctttcgaaacgatgatgacacgccacggaaaactacggtttccatcagtctttgcgatgtaattctctctggtaacaaccaaatgattggaataccagtagtaaggattggacggatcggagtctattgtttctttcgggtagttggcccattttccgcgcatggagttgtagccgttggattccatatacagagccggataatcataggtatttgattccgttacgaccactttatagggagaatcgggatattcgtataatactggagaaacggcaaagcgttcgtaaggaatttccaacggacctttgtagactttatagagtctttcaaagtttctatatccttgatgcacctgatgagtacgtccggattgatccgtttcgccggaataattagcatcgcattccggataatagatggttggggtggaagctaagttgaaaatagcatcttcactgatgatcgtaatttctccgttgagacgggtgacgaaatgataggccactccttcatcataagcacgtactacaaggtcgcagctgtcgttgaaagaaacggtgagttcattataagtatcctgtaattctttgtttttaccaacagggacgtcgatagtctgattcacctttcttttctttaccgactttacacttccgttgccgattactcttccgtccgccagatgtaatccgatgggagaaggaagtataagttgtgtattatcgtaccatacttcgtattgggtacctttgtctattttcagtttaatcttcagttttccgttaggagaaaccgtttcatatttctctgcctgtagcgtgcagcttaaagagaataaacaaaggagtattaaataactgatttttttcttatccatataatgtgttttattgagaattaaagatgttattaaatttaattgtgccaacctttttttcttaaataatcgagcaaataagcaggttgatctgtttgtaaaatccgggctcctagctgttcgatcagataaccgtagcttttttccggatcggtcagtgcaagattatcatcatgatttcctgcaagtgatccccataatgtgttataccaaatcaaacttttcttaaaaagtaattgttttatttttggaggaagcggatttttggggtctgaataaataatttcgaaagcagcaggacgtaattctttcaaatagtctgtgattattttctcagcttctttgttacctaaatctattactggcatatataaaactttatccaaataagaaccaaattctcgtttgacagtttctataggctgtcctcctttcatgattacttgattttgggtttcggttttttccaatatagcatatacatcgtcaaaaatgtcatatgctttgtccaaattaaccatgatttttccttttgctgttaacaaagcttcttctaaagtgggcacaacataatttgttacttttccatccttatctttcaattttaacttttttatatctgccagagtccagtttttaatttctccttttccagtggtagtacgatctagtgtattatcatgcattagaataagttgtccatcttttgttttttgaatgtcaatttctacaatatctactttcatagcaatggcgctgtcaatagcagcagttgaattttccggtgcgctacgccaatttccccgatgagcaacaactaacactttgtttgattttggatttaagaaagtatttttaattgtttctacgtgttgttgtgccgttactatgcaggttgataaacaacagataattaataatagagttgatttttgatttttcattattgccatattaaaatagaatgaataaggtttaatgtactaatacattctttataactttgatcacttgatttgctaaagctgaataccctgcgtcgatcggatgtgtcccgtctccgcctgcataatattcgggatggtcgatgactactttccataagtcgttcacttctatgccagcataattgatatgtttcaaggcaatctgattacgtattttcaaccgttcggtgataggggcaaactctttcattccttctccggtacggacgggagtggtggttgcccaaatcaacttggctttaggggcgtatttacgaatgattttgattaattttgtgaaacttttatcatactcttcttctgtataatcgaatccgtgcaaaccattattgaaatggataacgtcgaacttagtatttttgagtactacagtcaattcttcgattaaagccggatcacctacacttttcgaattagagagtcgccctacatatgctttttctttcaatgctgcttctacttttccataatatccgcgtgtgatggaattaccgatgagcaatacatgtggaagatctgttttattagctccgggaatccaaatatcagaccattcgatatattcacgtgcaatctttttctgtgcataagtgaaaatacaaagtgacagtagaataaatgtaataaaggtgtgtttcattattttcttttttaaattggttatgttatataggttcggatacaaaattaggtaataacagaaagattatatgtgtacaaagcaatcaaaaaatgaaatatttgcagcaaacattctattttttgattgctttatatctataatagggtatagataatttctatctttgtgaaaaaaagtaaaatttgaagatcaatatcatgaaaaagtacattttatttatgatgagcgtttggttcatccagttggctatttttgcccagtctagaataatagaggtttttccggagcagggaaaagatattgaaaatatagcgttagctttaaaaaaagctgctgactgtaaaggaaggccggttactgtaaagttttcaccgggaatttatcagttagaccgtgcgaaatcatcacaagtgttatattatatatcaaatacgacttctgagttggatgatcctgatccgactaaacatatcggattgtatcttaatacattaaagaatatcactattgatggttgtgggtcaactttattgatgaatggtgaaatgacaagtttcgtacttgataaatgtgaaggtattgttttgaaaaattttaatatagattataaacatcctactcaaacggaggttgaagtattggaagaggggaatgattatttgattgttcaggtacatcccacatcccaatatcggattgtagacgcacagttggagtggtatggtgatggttggtcttttaagaacggaatagcgcagtcgtatgaccgtataagtgaaatgacttggcgttcttggagtccgatggagaatttgcttcgtacagtagaacttcgtccaaatgtgttatatctgcaatataaagaaaaaccacaagtaggactacatactatttttcagatgcgcgattctttccgtgacgaagtgagtggatttgtaaacagaagtaagggaatactgttggagaatatcaacttctattatttaggaaatttcggggtagtctgtcaatacagtgagaatattactgttgatcgttgtaactttgctcctcgtccaggttcaggacgtactaatgcgggatttgctgattttattcaggtttctggttgccgtggtatgattgatattaagaattcccgttttataggtgcacacgatgatcctataaatatacatggtacacatttgcgagtaatagaatttttgtcggacaatcgtttaaaacttcgttttatgcatgaccagacttttggatttgaagccttttttaaaggagacgatatagaacttgttgattcacgttctctgttggtagtagggaagtgtaaagtaaaagaggcaaaattagtaacgccaagagaaatggaactcactctgtcaagtccactctcttcggaggtaatgcaacagaaagacctggttattgagaacgtgacgtggacaccggaagtgcggattacaaacaattactttgcaagagtaccaaccagagggattcttatcacaacacgacgtaagtctctgatagaaggaaatacattctacggcatgcagatgagtggaatatttgtagccgatgatggattaagctggtatgagtcaggaccggtacatgatttgactattcgtcaaaatacgtttttaaactgtggagaaccgattattagcattgatccggagaatagagaatataaaggggcggttcataaaaatattactattgaagaaaattatttttatatgagaaaaaatagctcatgtgccattcgagcgaaggctgttgatggcctgatgatacgtcataatttgatttattctctagatactgaaaaaaataaagagtctgattttattcagatgtataattgtaatgaagttacaataaaagaaaatcgggtacagttgcaccacctatttaaataaattctatttcaattttaaaagaaatagataaatatatagtaaaagatttgattatagtaaaccctggaaatttataatacaaacttccagggtttatttttataagaataacatttgatgaatagtttaataaaatggagaactttattcagctacactccacaatcttactgacttaaattctatatttctacagatatctgagaaagatactacccagcctacggtaatagttttttcttctgttagttcaaatataggtaaggcagatgttttattagtatgttctgactcaaatttgaggtaagagaggataatgtctgacttttccaattcttcattgtcaggtagtgattcgccttgagctacagcaaaatggatattggtactgccagaacctatatttgcggcgttttttacttcgatacgcatttcatactttccttctggtaaagtaaatgtttgccagatctttccgttgtcataatatccctgactccattgtgttgtttcgaactgaattgttccatcgttatattctgtgaagccggcacctccattggcatttttagtttccataacttcattccatttccaatcgtaaggttttccccatttattgtttacatcatatcctctaaatggatatccggcattcttaatataaagactggttaggtcttttgtaatgccaatgtaactttgggaaggcaatgtaacttctttatattctgtaacaaattcgtccaaggaagttgttgtcggtttatatatactattgtaccggagtattccattagctttaaaattgtcgagttctgttgtagtctcgtcaactgaaatatatttcgagcctaaagttccgtcctgacgttcatattcaaggttacagcctactaaaccatctcctcttgatatattccaattcagtttggctgcccatattctttctgattgtccactttcatttacaatttctttttgttcaggagagatactatgtaaaatccggttggttaatgcttgttggtatagttcgccatatgcataagcagatacctctgtcgggatagatgtgttgtttttgggatcataggtgactatcgagaagtcatattgtccttctgttaaattctctaacataaattcgaaggtttctcgtggttccgtacgttctattggaaactctttaaacttttcttccaatgtaataggatctttgtaactgataacacattttacctgatttacaccgtacatcatttttccttctattttgattctgttttttccagtaaaagctttgagtgaatcaagttttcctacatagattttttctccctcgtctagataaggctgaatgccatccagcatgccattacatgaatagaaaaagcacaggatactacagagaatcaatatatttatttttttcatacttttgctttgttaaaaggttattgtatcggggttccgtagaaccaaagttgctgcataactaccaatccggcaccgtcatgagtagaaagtattttaaatcgaatgtatcttactggaggaatatctgccggaaattcaaattcttctcctttactagcatatgttatatcttcttctgaatttgaaccggcgggccatccggaaggttttatgctttcacaatctgccagtttggtccatccgtcccaacttccgtccgaagatggtaaatcagaacgtccccatacttcccattctttgatagcacctgcacgatagtaataactacctcccatggagcgttgccatgaggtgaagcggcttaattgagcggtttgacccatatcgaatgtaaaccatacaggaaactcggaaggattaaagtcataaccgtgagcataattccaactgtttaatccatgatctccattgaataaagactccaaagtatgacctgcgttgtccatctttatatcattggctagatagaaagttttgaatttggtcaaatccaatttttcttcatatagtggtgtcaaggttgttaagtattcttctgactggttatcatatagatcgcggacacgaactttaaaatcatgtggttcggcagagaaccctcggagtgtaaagccgatgttttttacagaagtatattctgtatgttctatattccaattaccttttgaatcttttgtagatacatcaaagatgagatagtttctgcctccatttgtagtatgtatataaatacctccgaatgtaggatttacctctatttcttcaatggcagtaaggtatgccggttttccaggtactatttcggtgatgatagcttctccttctttctccattttgttaacggctgagattactagttttttcggattcgtatttccgaaaccttctattgtcgtttcatcagtatagagagaagcacgtgcttccatttcttttccattgtcaagtgtatattttattttgatatacaatagatcttcgtctgttggagcaatgaatttcaatgtcactccaccaggaatttgttcataggaagtcacttgtactgtaccaggagcatgtccactgccatccccataaggtttatgagtttctacatcttcgcaactgtgtagcaatactgccgcacatgccatccatatataatataagattctttttttcattgtttttcgatgtttataattaccatccatacgtttgaattaatttgtcgtctacttgtaagtcttgtttttttataggccacaaatagtctttagttgtaaatgcgcgaggaacaaagagagttgtgactttataaaagtcttcctctatttctccttgtacgttccatcctttaatggatttactcagttcttttgaagcgtctttccatcgtctgagatcattgtattgatgtccttccaacgcaagttcaattttacgttcctgtttgatgatacttctcatcccatctttagttttaggtttggtaggatcattgctgtacttttcccatgctactctgacatctcctatatcttcggtctgtccaagtacaccttttttcaatccagaacgttcgcgtaccttccgtaggtatgtataaacttcttccggtacattattatcaccttctgtagcttcattaagtgattctgcatacattagatacaagtcgcctaatctgataatagggaatgggtattcgtagactacttgtgaagattgagttatagcattttgataatatactacttttttagcgaaataacctgtaatggagtagttaaatccccatttgtttccagagtttcttccatatttaccatctacataattcaagtcattgacatctgtacgtccgttaccataccaagtggaaccatcgaaaccgagagacccgtagaagcggggttctctgttgaagtgaagtacggcagtggtccagcctgttcgcatgttatatttatcagcactagtcacttgtcgggttgtgtaacgattatcatagtttccgtttgttaaccattctttgtcttcgtcaatgggcactccatttttactgtaaaattgttctgctgtttccagtgtaggagcatatacacctgctgccctgctttgcaaaatacctcctgtcacttcaccgtttccactaccttgttttaaggaaggaagaatacaagccatagagaggttctgcaattcgttagtaccttgtttgcctacactccataccaattcggggttaaaacgttctgttaccgtctgacggatattcatactgtaaaatatttcttcgggtaaatcctgactataagacatatccatgctacaatcgtaaagcttgcatccgttggcttctgctgattcgattgccgctttgcaggcttccgcggtttttacccatttttcacggctgaattcttgattgatgagcggttttccttctttatttctaaagtttgcatactccttgttgccattgaagagaggactggctgcccataataggattttggcttttagggcgagtgcggcaggctgcgtcagacgtcccatttcagtagcttccatagtgatgaccggcggaaggtctttgtaagagtcatctattaattttaccataaagtctactacctggtctaccggcatacgggttacttttactccttcagacgaagttgatacggggagagcttcgtctacaatagggatagggccgtagtgctcaaacaagaagaaatgatagtaggctttcagtacatttacttcggctatccatctctttcgttccgaatccgtcaggtcgtttactttatgctgatctctcacataacttaggaaaatattacattcccggatggcacggaacataggaagcttacttcctccttctccatcccaatagttggcatatggcgcatttgtattctgcaatccgcgggctatgtaaaagctgacttcattatcaaaataagaatctttgtcggtataaaaccaacattcgtgtccggctcccataccgggtatgcgtttaacggaaccatgatcggggacgaaatgatagcaatttgccaagtaacgctgggctgtattcttgttgttaaatacaatgtccaatgttgtcacgttatcgggaacgatgtccaaataatccgaacaggaacaaagcaagcccaagctgatgaatagaatatatttcgtaaattttttcatatcgttgcttattagaagttaatgttaatgccaagattatatactcgctggatggggtatcccagaccattatttcccatttctgcatcccataacttaaatttactgaaggtcagcaggttgcttcctgtcaaatataagcgtaaggattgcacgcctatttttttcaaggctttctgtgagaatgtatatcccaattctactgttttcaaacggaggaatgaaccgtcgtgcatccaccaggtgcttgttaccatattattatcaacaagtgtgggagacaggcgaggccagaatgcatatatgtcgcggttgttttcagaccaatggtcgttagcaatgacatctaaacattgctgtacgcctatacgatcaccggcatcataatttacaaaaggggatgtatttctgggatcgatgaagaaagatactcttgcatttccctggaagaacatagaaaggtcaaaccctttgtaaccggcagaaaatccgaagccataggtaatctccggctgattaggatagccgaggaaagtctggtcttcatctgtaatctttccgtcgccattcaaatctttatatttgatgtctcccggcatagctccaccattgaaacttgtctgtgagggagagttggcaacatcgtttacatcaataaacaagcgttcggcaatatatccgtaattgtgattgatagcctgcccgattctggagcggtatccttgtccgtaactggcataatccagttcttcataaacttcatacctacctttggcgagtgtgaagtttcccattccttttatccagaaatctttgttggcaatataagaatagttggcagacaaatcaattcctcgggaggatgcttcacctatgtttgcgcttactccggcagaaagtcccatactagatggaatatgagcacgaggttggtaaatctgggtacggcgttcatagaagaagtccgtctggatttccaaagcactgttgaacatacccagttcaaaacctaaatttactttcttcgatttttcccaagtgatatagatgttgggataacgggaaacagatacgccgttcatatgattatcataatctgttccgaagaattgatcgcgatttccatcgttggggttcacttccgacaaatagtagaaacggtcttccgagcttccgatagcatcattacctaccagtccataagtcaatttgaattttagtttgtccactgtatttcgtagcggtatccagaagtcttcattagaaatgatataaccaagaccgaaagaagggaaaaagccgtaacgctcatgggcggcaaaacgttcggaaccattgtatccgaagttgaattctgcaaaataccttgaatcataagcataagtgaaacgtccggcaattccctggtttctacgtggtaatgattgttgcaaggtcttttcgcttgaccttttttcttctcggcgggtatataccaacattccgctagtagcgtgtgcaccgaatgtccggccatagctgacggctgcttctatataattggtggtgttgatgttcttagcaccttggttataggataaatactcttctccttctacaatattggtcagcgtataactattgttcgttttatcatagttggcctgatagtaataaggattaatggcacgggtgaggtcggaataagaagaacgggtggtgctgaccagaactctggcatccaatccttgggtaataaaatccagtttttgtttcagttcggcttgtgcggccaccaataagttattggattctttatatcctcttaccatatctgcataaggattgatgtaagctcctttattggcattaccaaacagtacatgcgtgttattggcatactcgtctgttgccggataacttttaggatataagacaggactggttttcattacctttttatagagtccttcaccgctgtcgagcgggccggtataatcatcgaagtttccgttgacacgaatggcaaattccgtagttttacttaagtccatattgatatttgaccggacagaataacgttgccagttgatgttactgttgtaattgttaagcttatcatttttgattactcctccgtctttggtgtaagaagctgctacataatagcgtactgcactaccaccaccactcaggttggcgtttactcttgtggagagagcatagtcattgaataactcatcataccagtctactgccggataataatatggattagtaccggcaatggtattttctattttttcttggctatatacagtgtagttggcactggcagcaggattgttgggatcacgtcgtgagttaaccgcttcattgttcagtttcataaaattgacagggtctgtcaacttcaccttttttcggggagtagataccgactgttctacgcgaacagacactttaggtcttccagctgttccctgtttagtagtcacaaggattactccgtttgctccgcgtgcaccatacaaagcagtggctgtagcatctttcataatggagaactgtgcaatatcatccacatttaggcgggcgaggtcgtccgtactcaattcaatgttatcgatcagaatcaacggatctttcttgtatccgaatgttgtagcgccacgtacaaagaattgggcattatctttaccgggttcgcctgatgtctgaaaagcgatcagaccggacattcttccggcaagggcggttgtcaagttactgcttggcactttcaattcctgtggatttactgtagagacagcactgatgacactctctttcttttgcttggcaaaagcgactactgtcacttcgtcgaactcgttggtttcaggaagcagtttgatagcataaaaatctttattgtctatttttacttcctgctttttcataccaaggaatgaaacgactagtatctctccggttttcgcttttatagtgaattttccatcgatgtctacaattataccaccttgtctgtttttaattgtaatagtggctcctgccaaaggctcattatcatcaccggttaccatacctcttatttctctgttttgcgcgtatatattcgtcgcaaagaaaagacagagtagaaccagaatcagccgattcattttaaagaatgaataagttctttctttcatgtttttcatggataattttaaattaatactaggttaatacacttctgacaactagactgttgtcttgttaacggtggaaattctcgaattcgtttcatatattattagatttaaatgtgattattctcataaattcaatgagtcaaaattaggtgtttgcattgtttaaatgatgtataaacgctgcaaaaaataacgtatttactgcaaaatacttttgattaggagtattataaataatatttcctgtatttatattaatttgtatcgaactattcaaagtagaaattttgtatctttttattgcttaatcgaaaattttcaaagaagaataattagaatagcctacatttatagaataagaacctttatcaatcggaaacaatgcttttcctgtataatcataatatgtgacagtataacttaatgtatagttttgatttggttctatccctagtttagtgctaaaatagtatgttcccggaatccattctattttatattgttttgtaattggagaattctcaaaaataccatttatagcaaaaattatttttgctgaatgaacacctgatataagaggtcgcagagttccataaagttctaatacagaacttccgaatccatcaaaattgggtgctggaattaatccacattgattatagccttttagttggtaaggttctgaccaagtgcttctagagccatttggtgcatattcgtctacacatattcttataacaggatttccttttggctaataatttccactaaaaggtattatatatgaatttaaagcttcacctgataatacaatatatggagtattaccaccatttggattataatatttccattctgcaccactttgatattgaagataaatattccattttccaatatattgagtgggatgaatgtaaaatagctgaatccaatttccataaacattctcaccatttatgataggatggagaggatcttgtacgactctagtcattatagtagtagtttcttctttttcataatcatcgaaataatttgtattacatgatgtaaataatattgttatacaagtaattaaaataagtaaaaagtttttcatgttaaataattttttaagttgaataataaaataaatattttcataaaaatgttgatactgtaatattttatataagaataatagttatgcaatcatctacattcattttaatttgtatcgaaccatccgcattcttcttcggaatgaatgtttttttgttcaatttccaacgatatgcttcagcgtttggaagacgaagaatgaattctgttgcagcggtagccttgaataccgtattttctatccgggcgtttttccagcttgcgtctatttcgatacctccacgcgcacaaagtcctttgaaacttccgtttttccattcttccggcagacaagacaataattcgatgcaattatcatgactttgcaataacatttctgccatacctgctgctccggctgtatttccgtcgaaggcgaaaatatcttcacctgctccggcgattccggccggggaaacagtgaacatattttcacgtgatagtttcccaagtaattgtttcacactgctataagctttttcagaatctttcaatcgggcatagaagcaaatcatattggcacggctccattctgtgtcttcccagtctttggcggccagacgtttttcgattgttttggcggcagcttgtgccagctcgggtgtcttgtccaatgtaatttgggaatagggataaagggataataaatgtgtagtatgacgatgattgggatgtgcctcttcgtaatcttcaaaccattcctgtactcctccgtttgtgctgatacggaaaggagggagttggctgatagcggtacggaggctgtcggcaaatgaggcatcgacatttaatatttccgtagattgcaggcatgccgagaatatctcataagccagtacacggtcgcaagtcggcatcatagatgcgcaaaattcttgtccttgatggcgaaaactgttttccggcgagatactaggacctgttaccaaatagttatttcgtgggtctattaccatataatctaatagaaattcagcattactttttaataatggatatgcggtattctttaaaaaatctttatcttgtgtgtaatcatattgtgtccataaatgagaggcaagccaagaagatgcagtcgggaataatccccaaagaatactacctgatacagctgtatatccccatggattggctgtagtatgtgcagtccatcctttacaaccatataaatcttttgctgtttttgcaccatgaattgataaatctttaatatagtcaaaaagagggagatgacattctgctaaattacctacattagcaatccaataattttgttcagtattgatatccaaatgataatcgttagtccatcccatatggcaagcgaggttatcgttaaaaaaaccttgtaaagctacaggtagaggagaattaggacgtgaagaagcgatcaacagatagcgggcatattggaaaaataatgcatctaatccaggatcagattctcctttctttacccgtgcccaacgttcatcgtttggtaggtgatcaaactttgcgtgatgctcaaacgaaagtcctacccgggagaaaagtggagaatagtcttctatatgttttttcttcagagtcttaaaatctttctttgatgctaattcaattgttttctcacattttattttgtagttgtaaccagagaacgtattgtttttaaaattggtacgtacatcagataataaagtgacttcagtagctttctcaatataaagttttttcccttcagcctttattgttcctccttttatttgtacagcaatacgtccttcaaaatgtactcctcctttaccatgtttttcaaattctgcattaccggtataaataagttggttaccggatgctactacatttgcctgtctgagtaatttcaattcaagttccatcgttattgcttttggacgactagcttttatatgcatagcaactacgtcatctggattagaagcgatacattggcgtatatattcagtattacctactttatagctaactgtatttatagcagtatgtaaatccagttcatggcgataatctgatatttctccttgaggatatgaaaaatttattttcaagtcacctatgggaagatgtgttcctactgaatgtgggctacctgccatcatatttcctgcgacgtgattaccttctgacaagttattttcaaaaaatagctttcttacttgattgagtttttctcttccgaatggacgttgctgatgttcatcatattcccctgaccacattgttgattcgtttagagcgagtgtttctgtttctatgccaccatagatcattacaccaagacgaccgttccccaaaggaagagacttcatccattcatctgcaggtttatcataccataatttcattttattctcggttgccttcagtgacagactaccactaactagaagtgcggcccctattatcaggcctaatgttacgtttctcatgttataaaatagtttatttcaaaatgatattgcaaaggtataggagaaggtaaaagtaaaaatgaacaaatgcggctattactgaaacaaatgcgtcaactcctttttatatactgttttttagtgtatatttgcgcgcacagccaaatataaccactatataatttatgaagaaacacctactacgattagctttcataaatggattgctattcttatctatttgtatttttgctcaggaatattctgatttttatttcacccgtgttaatggagaaaatggtttatcagagagtaatgtaaaagcaatcttgcaggatagctatggatttatgtggtttgggacaaaaaatgggctcaaccgctatgatggaacttctattctccaattcgattgcgatgatttggaggagggtacaggtaatcataatattggtgctctttttgaggataaagaaaggaatttatgggttggaacagacaggggtgtttatatatataatccggcggttgatgtatttaaacgtttcaaaatagcttcatcagaaggaataactcttgataactgggtagcggaaattctgtctgattcactagataatatttgggtgttaattcctgatcagggactttttcgttataaagacggaaaggtacatcattattcattgatagataaagacaatttaaaaaataataatccggaatgtatttgtatcaatgagcagggcgaagtatgggtaggtacatcaggaataggtttattcaagtacaattatcgggatgataattttgaacaatatttgacagaccgaatgggacgttcgttaattgacaaaacaattataagtatttgttttcagaaagaaaatgctattttgggaatacatgaaggagatttgctgaaatataatactcgaacagatgagttgagtgaagtttcgttccttggtgagaaaaaaacatttttgcgagatgtaatgtgttttggagatgaaatttgggtaggttctcttcatggaattttcattattaatgagaaagaaaataatgttattcatttgaaagaagacctgatgcgttcatttagtttatcggataatagtatttattctatttataaagattatgaaggaggaatttggattggaacaatgtttggaggtgtcaactatctgcctaatcgtatcttgacttttgctaaatatgtaccgggaagcgatccatattctttaaataccaaacgtatccgtggattggcagaagataataatgggtgtatttggataggtactgaagataatggtgttaatgtattggatcctcgaacaggtaaagtacatcagatatatgataatgttccaggtcgtctcattacactatcagtaaaacattatgaaaatcatatatatgttggattatttaaacaaggaatgaatgatattagtatacctggtgaacatcttaaatacgtcagtgataaggatttgggtattgaagaaggaagtgtatatagttttttaaaagatagtaaaggtcgtacttggataggacctgggtggggattatatgtatcacaacctaaggaaaggaaatttcaccgtgtggaagaagtaggatataactgggttttcgatataatggaggctagagatggtacaatttggcttgctactatgggaaatggtgtttggaaatgtgatcctaagaataattcttataagaattattcttataaggaaggagttgacaactctctaagctccaactccgtcagctccatcatgcaggacagtaaagggaatatatggttctctaccgaccgtggcggtatatgcagatataatgaagcgcaggacaactttaccactttcagcatcgaagacgggctgccggacgatgtagcttacaacatattggaagatgatgctggaaatctgtggtttggcaccaataaaggattggtcaagttcaatcccgagaatggagatgtacgtgtctttaccaataaggatggattgctgggtaatcagttcaattatcaatcggcattgaaagctcaggatggaaggttctatttcggcggggtggacggattgatcgcgttcgatcctactgttcaggaggaggaaaggccacttccgcctgtctacatttccaaattcagtatatataataaggaggtgacagtgcatactcctgaatcacctctgaaacaatgtatcgtacatacggatgaaatcgtcctgccttatgatcaggccaatatcagttttgacgtggccttgctcagttactctactgccgagtccaaccaatactattatcgtatggaaccgctggacagggattgggtacgggcagccagcaaccagaacatctcgtatgccaaacttccgccgggaaaatacaccttccgtgtgcaggctactcacggcagcaagtccgagtcgtccacacgttctctgtctattatcattcttcctccgtggtggcagtctatcatcgcttatattgtatataccgtatgcattatcctgatcgtggttggtaccatcttatggtacaaacgccgcaaggagaagcaactggaagaacggcaaaaactgttcgagatcgaaaaagagaaggaactgtacgaatccaaagtagacttcttcacagagatagcgcacgaagtgcgtacccctttgacactgatcaacggtcctctcgaagccattgaggaaatggagatacaggagcccaagatgaagaagtatatcagtgtgatggtccagaacaccaaacgcctgctggaacttaccggacaactgctggacttccagaagatcggtgccaacaagctgaccatgaaatttgagagcgtggacattaccgaacttcttgccggaatcgtggcacgctttgaagtgacgttcagcctgaaccggaaagaattgcagttaaaatcgacagaagagcaggtgtgggcagctgtagataaagaagcaatcaccaagatactgagcaacctgctcaataatgcgctgaagtacgccagccagaatgtactggtagaactggaaaagggagaagacagctttacgattcgtgttaccagtgacggaaacaagattccggcggaagtcagccaatatatattcgaaccgttctatcaggtggacagaaaggagaagccccgtaatggagtaggcatcggcttgtctctggcacgttcgctggcatccctgcataaaggcacgatctatctggatacccgtcaggaaaacaatatgtttgtactgaccattcctttgaatatggagggcattaaacaggagaacaacaaagccatacagaaagacattgtcgagctggacgaacatacgcccgtcacggctgatatgtatggatatacccttctgttggtagaagacaacgaaagtatgctgacctttattctcgaacgcttgcaggaaaacttcaccgtagagacagcgatgaacgggatagaagcactggaaatattgagaagcggccatatcgacttgatcatcagtgatatcatgatgcctgtaatggacggataccaactctgcaaggaagtaaaatcggatatggagctttctcatattcctattatcttcctgacagccaagaatgacatcgacagcaaaatcaacggtctgaaatatggtgcggaagcatacgttgagaaacctttctctttcaattatctgaaagaacaagtcctgtccttgcttgacaacaggcgcagggaaagagaagcctttgcgaaacgccccttcttctctgtcaacaatatgcagatgaacaaggcggacgaggaatttatgaataaagtgatcaaggtcattgaagataacataaccgatgataatttcggtgtagaacggatggcggatatactctgcatgagtcgttctagtttgttaaggaaaatcaagacactgttcaacttgtctccgctcgattttatccggttgatcaagttgaaaaaggcagccgagtttatccaggaaggtaaataccggatcggagatatctgctatatggtcggcatcaattcgccgtcttatttcagcaagttattcctgaaacaattcggcatgacacccaaagattttgagaaacaatatcaatccggcaagcagatcattatcacgcaggagataaagaatgtcgaggcaggagagggcacaaaatagataaaatacctctcttagcccgcattggagcttatttgccgtatttttatcattttttgaatcgtttgtatatagtaaaggagatgccaatccttacctttgtggcatacctcaataagagaaaaaggtttcttattcgggtatgctttatttttttacataagaacattgtaccatatgaaaaaccaaaagctactactaaaaaaaatgtcgggagtatccctgatgcttcttctgtttcttttcatttccaactgtgccagtggagacaagattttctctaccgatgtatggaatataacttacgatgatcagcaagggggaatagcactcacttataagtcaaaaaatatttgtaacggaatgtatgcttcctatcaatgggaagggaaggagatcaagacaagtgactatgcccgccataaaatcagtacgggcaaagtttccgattctttcgggaaaggacatatatataaggtggagtatacggataaggagcttccgaagctgactcagtatttctatctttatccgggtaaggaatatatactgaccgattttacggtcgaagcgaaagaggaaatccgttccggcagaatggctcctgtcaatgtcgattctatatccggattcttgcaggcaggtgataaccgtgctctttttgttccgttcgacaatgacaaatggatcagatatcagtctcacccgcttggtttcgatacattggtgagttatgaagtgacagccatattcaataatgaaagccggaacggtctggtgatcggctccgtagaacatgataactggaaaacaggtatttcaataggtaagggggatcgtgataacattggttcgctggtatgttatgggggcatagcagatgagcagactcgtgacgtaaaggctcacggtgcattagcaggtaaaaagattaaatcccctaaagtctttttgggtttctttgaagattggtgcgatggacttgaagcgtatgcaaaagccaacgctgtaattgcccctcccaaagcatgggagaaagctgttccatttggttggaacagctggggggcattacaattcaatctgacttatgagaaagcgatggaagtctccgattatttcaaggagaatctgcagaataatcattttgtaaaccctgatcagactgtctatatcggtctggattccggttgggactgtatgaatgaggagcaactgaagtcatttatcgaaaaatgtaagtcgaacggacagatcggtggtatctactggactccgttcaccgactgggcacgcgatccggaacggacggtagatgccgcaccggaatataaatacaaagatatctatctctatgccaacggaaagccgcaggaactggacggcgcttatgcagtcgatccaacgcatccggcagtggaagctatgatgaagaagacttccggtttgttccaccgtgcaggattcgagtatgtgaagatggacttcatgacacacggtgcgatggaagcggacaaatggtataatcctgagattaccacaggtatacagggatataattatggcatgaaactgctcaatcaatattttggagatatgtatatcaatctctccatttctcctgtcttccctgcccagtatgcgcagtcacgcagaatagcctgtgatgcgtggaatcagatcaaggataccgaatatacattgaacgctctttcatacggctggtggcagaagtatatctatcaatataacgatgccgatcatattgtactgagagatgctaccgacggagaaaaccgtgcccgtattacttcgggtgtcattacgggtatttacattacaggagacgatttcagtgcgggaggaggaaaagacgccaaagaaaagtcacagaaatatctgaccaatgcggcagtgaatgcagtagcgacaggagaagtgttccgtcccgtggaaggaaacggagagaagccggaacatatctttgtaaggaagacacccgatggtcgtttccattgtgcggtattcaactactcggaccaggaacagacaactgtgctttcgttagaaagaataggattggacaaggcacgcggctatcaggtgaaagagttgtggagcggcaatgagacttttgccacaggacagcttgaagtgaccgtaccctccaaagacgtgcaattacttgaatttaaataaccgaagaaatgaaaaaatatcaattaacactcttatcgttatgtgtggcagcctttgcgcaagcgaaggtcacattgccgtcattctttaccgataatatggttattcagcaaaacagtcagctgacgttgccgggaaaagcaaaagccggtaaacaagtgactgtgaaggtgagctggaatcatgagaaatatacggctaaagcgtcagctgatggtcattttagcatagaagtcccgactccgcctgccggaggaccttatcagatcattgtttcggatggtgagaaactagtgttgaacaacgtcttatcgggcgaagtctggatatgttccggtcagtcgaatatggaaatgcccgttgccggatggggaaaagtgatgaattacgaacaggaggttgccgatgccgattatccttccatccgtctgttgcaggtaaagaagaccgtcgctttctctccgcaggataacgtagaaatgaatatgaacggctggcaggaatgtagttccgctactgtaccggagttttcttccgttgcttatttctatgcccgtaagttgtggaaagaactgaatgtgcccgttggggtgattgactgcacttggggcggcacacctgccgaatcatggacaagccatcagacattgaagcaagtcgtgggatttcagaaaaagatggccgaaatggaaagcgcaggcttccaaagagagaaacttgtcgaactttaccatcgggaaatggacgagtggcttcagcagtttgatgccaaggatgccggattcaaagacggagttccccaatggatatcagctcttcagacagggaatgaatggaaaccgatggaactgcccgcttattgggaaactcgcggactgaattttgacggcactgtctggttccagaaagaagtggaaatacctgctgactggaacggcaaggaaatctccttccatctggctatgatcgacgacgacgatgttacttactttaacgggaaggagataggaagaacttcgggatgcaatacgatgcgtacttataagattcccgcagccttggcaaaggcaggcaaaggggttatcaccatccgtgccatagattatggcggcgaaggcggtatccacggagaacctcagcagatgtatatggaagcgaacgacaagaagatttccttggcgggcaactggaactatcacaccggagtatcgatgaccggtgcaccttctagaccattgtctcccgaaggaaccggctggccgacatcctgctatccgaccgtactttacaatgcaatgatacatccttttaccgtcttccctatcaagggcgctatctggtatcagggagaaaataatgtaggattcgacgagcagtacagagtacttttccaatcaatgattacagattggagaagggcatggaaacaggattttcctttctactttgtgcagttggccaattatctgaagcccgaagaagtgcagccggactccaaatgggcggctctccgtgatgcacaggcacatgcgctgcatctgcctaatacaggtatggcatgtgccatcgacctcggcgaagcttatgatatccacccgaaaaacaaacaggaagtaggaaagcggctggcgcaagcggcattgacgaagacctataacaaaggtacatacgaagtgcccgcattccttggataccgcatttcgggacgtacgctgattcttactttcgatcaggaagtagtagccaaagaaggggctccgaaaggctttatactggcaggaccggacgggaaatacgttccggcacaggctaccatccggggaaaagaagtcattctgcaatccgaccggatagaaataccgacggcggcttgctatgcgtgggcagacaatcctgtttgtaatctatatggcaagagcgggcttcccgtacccccgttccgcaccagagaataaatatcaaccataacaatgtaaaccatgaaattaaaagcattcttacttttttttctattgagttctttttctcttttgcaggctgccgacaagcctctgatcaaaatagaaaccgaacggaccagccttatctatcaagtagctgacaacggacgtctgtatcagaaatacttgggcaaaaagcttaaccatgattccgatatccagtatctgccacaagggactgaagcttatctgactcacggtatggaggactactttgaaccggctattcacatacgtcataacgataataactcttcattgctgctgaaatacgtagatcattcgagcaatgccatcgataacggggtcaacgaaaccgtaattacccttaaggatgataaataccctgtgaccgtgaagttgcattatgtggcttacggcaaagagaacattatccgtacgtttactgaaatcagccatgaagagaagaaacctgtgatactttgcaagtatgcttcatcaatgcttcacctgaacagcagcaagtatttcctgactgaattttccggtgactgggcacacgaagccaacgtgaccgaaagagaactggctttcggcaaaaaggtgatcgatacgaagttgggcgcacgtgccaatatgtttgtatctcctttcttccagctggctcttgacaatccttcgcaggagaatgcaggcgaagtgctggtaggaactatcgggtggacgggtaacttccgttttactttcgaagtggacaataaaaacgaactgcgcattatcagcggtatcaacccgtacgactctgaatacagcctgcccgccaaagaagtgttccgtactccggacttctatttcacttacagcacgcaggggaaaggtgaggccagccgtaacttccatgactgggcgcgcaatcatcaggtgaaaaacggtaatgatacccgcatgactttgctcaacaactgggaatctacctattttgactttgatgaaaataaactgatcggcttgatggatgaggctaccaagctgggcgtagatatgttcctgctggacgatggttggtttgccaacaaatatcctcgtagcagtgaccatcaggggttgggcgactgggaagagactgccgacaaacttccgaacggagtagggcgtcttgttgaagaagcacaaaagaaaggtatcaagttcggtatatggatagagccggaaatggtgaatcccaaaagcgagctttacgaaaagcataaggactgggtgattcatctgcctaaccgtgatgaatactacttccgcaaccagatggtgctcgaccttagcaatccgaaagtacaggatcatgtattcggcgtggtggacaacctgatgaccaaatatcccggcatcgctttcttcaaatgggactgcaacagcccgattacgaatatctattcggtgtatctgaaagataaacagtctcatttgtacgttgattatgtgcgcggactttacaaggtgctggacagaatcaaggctaaatatcctgatcttccgatgatgctgtgtgccggtggcggcggacgctccgactatgaagcattgaagtacttcacagaattttggccaagcgacaataccgatcctatcgaacgcctgtttatccaatggggctattcgcagatcttcccaagtaagacactgtgtgcccacgtcactacttggaatcgtggaaccagtatcaagttccgtaccgatgtagccatgatgtgcaaattaggattcgacatcaaactggaagacatgaatcagaatgagcacctttactgtgatcaggcagtcaagaactacaaccgtctgaaacctgtcatccttgaaggtgatttgtatcgcctcgtttctccttacggaagcaaccatacttcttccatgtttgtaggcaaggacaagaaaacggctgcggtattcgccttcgatatccatccgcgctatgcggaaaagacactgcctgtccgcctgcaagggttgaatgccgacaagaagtaccgtgtgaaggaaatcaatatgatgcccggtagcggttcctcattgaagggtaacaaccaggttttctccggagaatatctaatgaacgtcggactggatcttttcacaacacagcagctcaacagccgtctcattgaaataacagaagaataaaaagccatagacataagaaacatatcttataaaaacaccatgaaccatgaagaaattacttttaagtgtatgtgcattttcattgactctcgctacgttgcaggcaggggaaatcactaaatatgtaaatccgtttattggaacgggggccatcgatgggggactttcgggtaataattacccgggggcgacctcgccgttcggtatgatacagctttctccggacaccagcgaagctcccaattggggggacgcttccggctacgactataaccggaatacgatcttcggtttcagccatacccgcctgagtgggacaggagcctcggacctgatcgacattacattgatgccgaccagtagcggacgcacttcttccgcattcacgcatgacgcagagaaggcccgtcccggctattatcaggtaatgctgaaagatgagaatattaatgcagagcttaccactactcagagaaacggtatccaccgctatcaatatcccgccggcaaagatgcggagattatactggatatggaccactcggcagataagggcagttggggacgccggatcattaactctcagatccgcattctgaatgatcatgcagtggaaggttaccgtatcatcaccggatgggcgaaactgcgcaagatttatttctacatggagttttccagtcctatccttacttctacgctgagagacggcgggcgtgttcatgaaaacacagccgtgatcaacggtacgaatcttcatggctgtttccgtttcggccaactgaatggcaaaccactgacgtgtaaggtagccctttcatccgtctctatggagaatgcccgtcagaacatggaacaggaagcaccgcactgggatttcgaccgctatgtggctgctgcggacgctgattgggaaaaacaactaggaaagatcgaagtgaaaggtacggaagtgcagaaagagatattctatacggctctttaccacaccatgatacagcctaacaccatgtccgacgtgaacggcgaatacatggctgccgactatacgacccgcaaagtagcgaacaatgaaactcattacaccacattctccctgtgggatactttccgcgcttctcatcctctctacacattactggaacccgaacgggtgactgacttcgtgaagagcatgatacgccagtatgaatattacggctacctgcctatctggcaattatggggacaggacaattactgtatgatcggtaaccactccatccctgtgatcactgatgccatcctgaaaggtattcctggaattgatatggagaaggcctatgaagcagtctataacagttcggtaacctcacaccccaactctccttttgaggtatgggagaaatacggctttatgcccgaaaacattcagactcaatctgtctccatcactctggagcaggcttttgatgactggtgtgttgcccaactggctgcaaaattgaacaaggatgccgattatcagcgattccacaaacgctccgaatattaccggaaccttttccatccgaaaacgaagttctttcagtccaagaatgacaagggagaatggatcgaacctttcgacccgtatcaatacggtggaaacggcgggcatccgtttaccgaaggaaatgcatggcaatacttttggtatgttccgcataacatccaggccttgatggaactgacaggaggaacgaaagcctttgaacaaaagctggataccttttttacctctacctataagagtgagcagatgaatcataacgcttcgggatttgtgggacagtatgcacatggtaatgagcccagccatcacgtagcttatctctataattttgcaggtcagccgtggaagacgcaaaagtatgtcagccatattctgaacacgctgtataacaacacttcttcgggatatgccggaaatgatgactgcggtcagatgtctgcctggtatgtattcagtgcgatgggattctatccggtcaatcctgccgacggccggtatatcattggttccccgcttttggatgagtgtactttgaaactggcaggtaataaggaattccgtatccggaccatccgtaagtctcccgaagatatctacattcagtcggtgactttgaacgggaagaaacacaaagatttcttcatcactcatcaggacatcatgaacggtggtacgatggtgttcaagatgggtaagaaaccatccggatggggaaagtaaacagtatgaattcagatattgtatctaatagaaacatggatgagttatatcatatagggcaataaatattatagccttgtttctatataataagagactgtctaccttctgacagtctcttattattattttcttatttaacctcttcggaagtctgtaacatctggaacaacttgtccagctttggagccatgataatctccgtacggcggttcttgcttctgccttccgcagtttcattgtcgtcaacaggcatatattcgccgcgaccgctgggctgtatctgcaaaggatttacaccgtaattcttgatcaggatacgtacgacggaggtagcacgaatcacgctcaaatcccagttgtctttgaactgtacggtgttgatcggtttattgtcggtgtgaccttcgataaatacgtcgatgtcggtctgcttgttcaggacttccgccaatttgccgagagcttcctctccgcgtttatccagacgggcgcttcctgactggaacagcaatttgtccgacattgccacatacacctttccatccttttcacgaaccgtcagttcgtctgtgctaaagcccagtaacgcgtctttcacactgttcagcagttgtttcactttctcgttctgagcgttgatcatgtcctgcaactcgttgatggtgcgttctctttcgctaagttcgtttttcttctgactcaacaaggcattcagtttttcctgttccgtcatgttagtactaagcatgctctgatactgacggatactgtttcccatctgggtggtatcacgcaggagcttcttgatttgtgctgacagctggtcgcccgtgttgcggcaatcagtcaataaactttgcaagctgtcgatacttgcaatacgtgcggcttctgtcatcatgaacttctttttcgttacacatgaagtacataataacaatgtaaggaaagtaaataatgcaattttcttcattacgctttattttttttgcaaagaaataattttcttctgaagattacaaaaattcttttattaaactctgtgtcatatagttaagaaatggcctgagagaattttactgctggcacttcgttgatgtcaagacaggctgttgtgcggaatatgccaaagaatcagcgttgcagaaactcgcaaagtttctgtacagccagtgcacggtgactgatcttgttctttgtttcgtttcccagttcggcaaaagtctgttcgtacccttcgggcttgaatatcgggtcataaccgaagccggaatctccgcgcttctctttgatgatttcccctttgatcacaccttcaaagagatattcctttccgtcgagaatcagcgaaatggcagtgcggaattgcgctttccggttctcttttccttccagttcgtggagcagcttgcgcatattcgcctgagcatcgtggccttcgccttcggcataacgggcggagtacactccgggcgctccgttcagagcttccacttccagtccggtgtcatcggcaaagcagtccagctgatagttccggtagataaaagaagatttcagcaaggcatttccttccagcgtttcggctgtttcggggatgtccgtgtggcagtcaatgtcattcagactgagcagttctaccttatccccgaggatggcagctacttcttcgagtttatgagcattgttggtggcaaatacaagtttgcgtttcattgtcttattcttgttttttagcggaattatccggattcattcacctgtttatttcactttcaactgatcgaacccttcgccatacaccccgatgacggaactttgcgagatgaaagcgttcgggtcgatacgttttaccagtcggaagatatccagcgactgacgtcttttggccagtacgaccaatacttttacatcgtttttgctgtaccatccggtgccgttgagcacggtcaccccacggtcagtatctttgatgatgcggtcggctatctcatcatacttcttggagaagatgaagaactgtacggactgacgggcgctgttgataatccagtcgagcacgacaccgataatgaacagagtgacgaaaccgaagattacccgacgccagtcgtgaaacacaaagtaacaggaactgatgatgaacacatcacaaatcatgatcatccttccaagtgatacgtctttgtatttgttgacaatagcagcgatgatgtccgttcctccggtactgccgttataattgaaagtaatgcccagacctacaccacacatagccgcaccgatgatacaagccataaagtcctgtccgctgccgagcagcagaggctttccgtcggccgacatatcgggcgtttgtatgtagttgtttaccaacacctggaatatccatagcaggaaagtcagcatgaaaattgcataagtagtctttatgctgaatcgcggacctaatatcttgatggcaaatgtcatcagaaccgcattgatgatgaagtacgaccactggataggaaatcccgttgcgtaataaatgatagccccgataccggtagtaccccctgtcgttatctggtaaggcagcagaaatgccgcccatcccaaagcataactgatcaatccgagagtgatgtagatataatccttcacttctctcattatttccgcttttgctggtttgcgcatttaattaataggtaataagtattaagtaataggtaataagtcgtagtcgataggtacaggtaataagtattaagtattaggtattaaccttgcggatatgctcggaaagcagctacggttattacctattacttattacctgttacttattttaaactaccacatttacaatcttcttcggcaccacgatgatcttcttcggtgttttgccttcgatccacttctgcgaacgttcgtcggctaatacggcagcctggatggcatccgaagcggcatcagcgtcaaactccatgttgaagcgtgcttttccgttgaaggagatggtatagttgatcgtatcttctttcagatattcttcgttgtatgcgggccatgcggcgtcacatacggaagtttcgtgtcccagtgtatcccacagttcttcgcaaacgtgcggagcgaaaggagcgagggtgataacgagctgttccagtatctctttcttgttgcatttcaagttggagagttcgttgacacagatcatgaatgcgctgacagacgtattgtaagagaactgttcgatatctcccgttactttcttgatcagtttgtgcaggctcttcaactcttccttcgttgcaggctcgtctttcaccagatattcgtcggtacggctgtagaacaatgaccagaacttacggataaagcggtgtacaccgtcaataccgttcgtatcccaaggcttggactgctcaaccggaccgaggaacatttcgtacatacgaagggtgtctgcaccgtatttttccacaatcatatccggattgactacgttgaacattgatttactcatcttctcaaccgcccatccgcagatgtattttccgtcttcgaggataaactctgcttccgcatattcgggacgccatgccttgaatgcttccaggtcgaggatatcattggatacgatgtttacatccacatgaagtggagtcacttcgtattggtctttcaggttcagtgaaacgaaggtgtgagtatctttgatgcgatatacaaagttgctgcggccttgaatcatgccttggtttactaacttctggaacggttcttctactaccgatgcacctacatcgtgcagaaacttattccagaaacgggagtagatcaagtgtccggtagcgtgttccgttcctcctacataaaggtctacgtttttccagtattcgtccactttcgggtccaccaatgctttgttgttgtgcgggtccatgtagcgcagatagtatgcggaagaaccggcgaatcccggcatggtgttcagttccagcgggaagatggtaacgttgtcgatcttttcgttttctaccgtgcacttgtttaccgtgtcccacgcccattccttggcgtgtcccaatggaggttcgcctgtttcggtggggaggaacttgtctacttccggaagttccagcggcagacagtcttcgtcgatcatgtacggcattccgtctttgtagtatacagggaacggttccccccagtagcgctggcgtgagaaaatggcgtcgcgaagacggtagttcactttcacacgtcccagattatgttctttcacatattgcttggtcttttcgatggcttctttgatggtcagtccgttcagagacaggtcacagtacggagttacatccggacgcggagagttgcagacgataccttccttggcatcgaagctttcttcgcttacgtcacaaccttctaccaacgggcggatttcgagtccgaaatgcttggcgaaagcatagtcgcggctatcgtgggcgggtacggccatgatggctcctgttccgtatcctgccaatacgtaatcgctgatccagatgggcactgcttcacctgtaaacggattgatagcatacgaaccgctgaatacaccggtcacgctgcggtcggcgatgcgttcgcgttccgtacgtttcttggtgcggtcaaggtaggcgtctacttctgctttctgggcgggagtggtcagctgggctaccagatcactttccggagccagaaccatgaaggtcacaccgaacatggtatctgcacgggtagtaaagatggtaaattcgagatcgctgtcttttaccttgaactgtacttcggcaccttcggagcgtccgatccagttcttttgagtttctttcagtgattcggtccagtcgatggtatccagtccgtcgagcagacgctgagcataagcggatacacgcagacaccactggcgcatcttcttctggactacggggaagccgccgcgttcgctgacgccgtctatgacttcgtcatttgccaatacggttcccagtgcctggcaccagttcaccatcgtttcgccgaggtaggcgatgcggtagttcatcaggatttcctgctgttccttttcgcttttggctttccattctttggcggtaaagctgagttcttcgctgcaagcggcgttgagtccttcgtttccgtagattgcgaatgcatcgatcagttcctggatagggcgtgcctgctgttcgtcgttgcagtagtagctgttgaacatcttttggaaagcccattgggtccagtgataatattcgggttcgcacgtacggatttcgcggctccagtcgaaagagaagcctattttgtcgagttgctcgcgatagcggtcgatattagctttagtagtgattgcgggatgctgtccggtctgaatagcgtattgttccgctggcaaaccatatgcgtcatatcccatcggattgagtacattgaagccacgcagtcgtttgtaacgggcgtaaatgtccgaagcgatgtatcccagcggatgccctacatgcagtccggcccctgacgggtaagggaacatattcaatacatagaatttctgcttcgattcgtcttccgtaacctggtaggttttctcttccacccacctttgctgccacttcttttcaatctccctgaaattgtactccatagtgataaagtttttatttatagtgatttatactgttatttcaatttgagccagcaaatttacgtgtttattttcagataaccacgtagtgagtgaaaaaaacctttcttttataataaggtattgcccgaataacaaggtaatacctgataaatgaagaaatatcacggcaaataccgtccggctattgactttcttgtttttatttcgtatatttggaggaatataaaacggaatagtaatgataggatatataaaaattataacataagttcaataggtggatgtgcagaattgcatagccaggataacgaatgggcaagaaactgcgaaggttcttgcccatttttgttataataattccattgaggctgctggaaacgcctaaaaatagtttataataaacttggggaccgtttataataaactctctcgttatttattaaaaacgatgaaggagtttattcgattccgggggtgtagtgtaagaaagggagaaaactttttttgagtaaagttctcttcctttctttatgtggtaaaaatatgatatattaataggactgttttgatagtggtgatttgtttacaaacgggcgcttctatctgtaagactctctttttcgttagacttttggataatatgtttctttcatttggtattattatatacgtattaatgtgagtatatttggggaggattgtttgatcgtttataatacaaagaatatggataaaatgtgagtgtatactggttatagttgaagtcctgtcgggataatctttttagagtgttagctgaaaaagcctttaaataaacgttaaactagcctggataccgactaaaaagtattttttccaacctatatcctttattttctcctcgaattaattgcaaattaattactaaattaactagcgggacttacatttgtgccagttatcataaaattctaataaatgaaaaagttgctggtactattaacaatgcttcttacatccttctttgctgaagcgcaaaaaagcagagactattggaataacaagctaaagcttatctcattccgactacctcttccggtaggatatattccgaagattggtcaatcctgttgtaactaaccgaataaataaattgaatatatatgaaatatcttatcagctttttattcttagctcttgctttttcaatgaaaagtgaggctaaagtgacattaccttccatactcggagataatatggtattacagcagcaagcagaagtcaaactatggggaaaagcccgtcccaatgctactgtaacggtgaagacttcgtggaacgggcagacatataaatcctcatcggatggcaagggaggctggtcgttaacagtatctacccctgttgcgggaggcccttacaagatcatcttcaatgacggcgaattactgacgttgcagaatgtactgatcggtgaagtctggttctgttcgggacaatcgaatatggagatgccgatgggcggtttcgaccggcaaccggtcagagggacgaacgacattattgccaaagccaaaccatccacgcctatccgaatgtatactacagattcaaaggatgggagatgggtacgccagtttagtaaaacgcctgtggaggactgccagggcgaatggctggaaaatacgccggtaaacgtttcccatatcagcgccgtgtcttattattttgcgcgttatatacaggaagtgctggaagttccggtcggcatcgtcgtttctacgtggggaggatcaaaaatagaggcatggatgagcagagaatccataaagccttttagtagcattgatctttccatcctcgataacgatgctgaagtgaagaatcctaccgccactccgtgtgtactctacaatggcaagatagctcctttgactaattttgcagtgagaggcttcttgtggtatcagggcgaaagcaaccgtgacaatgccgatctttaccagagccttatgcctgcctttgtggctgacttgcgtgcgaaatggggcaggggcgaacttcctttctactttgtgcagatagcgcctttcgattacgaaggagccgacggtacatcggctgcccgcctgcgtgaggtccagttgcagaatatgaaggatataccaaatagcggcatggttacgacgatggatgtcggccaccctgttttcatccatcccgtagacaaggagacggtagggaaccgactggcgtattgggcattggcgcagacctacggcatgaaaggattcggatacgctccccctgtttataaatcgatggagatacaggagaataaaatctatataaacttctacaatgcccaacgcggcctaagtccgatgtggacatctcttaaaggatttgagattgcgggcgaggataaagtattctatccggcttttgccgaaatagaaaccacgactgcccgactggcggtttcgagtgacaaagtctctcatcccgttgccgtgcggtatgcgtataagaattatgtggaagcaagtattttcagtattcatggcatccccgcggcacccttccggacggataactggtaaaagcagacgattacctgaatagatacagctattttatcagacatccggatattcgctttcttgttatatccggatgtataaccggtctctttcggcgaaattttgttgaaaatatatctatcaaagtcagtgggtatatccatgaatccctgtatctttgcattctcattaaaaccataattatggaactaaagcatgggtactatcatctgattgccatactaacagtagctatctggggactgacattcatttcgactaaagtattgataaaccacgggctgacacctcaggaaatcttcttttaccgttttctgattgcataccttggcatctgggtaatttctcccaaacgtctgttcaccaataactggcaagatgaactgtggctggtagcaggcggtatattcggtggctccctttatttctttacagagaataccgctttaggcatcacccaggcgtcgaatgtatcgtttatcatctgcacggctcccttgctgactactatcctttccctgcttttctataaaagtgaaaaggcatcgaaaggactgatatacggttccctgctggcattgatgggggtagggctaattgtctttaacggcagttttgtgctcaaaatatctccgataggcgatctgctgactttgcttgccgcattatcatgggcattctatagtctgattattaaaaagatggccgggcgttatcctaccatatttatcacccgcaagattttcttttacggagtactgacgattctgcctgccttcctcctgcatcccctgcatcccgataccgctgtacttcttcaacctgccgttctgttcaaccttctgtttctggccgtattggcttcgctgatctgctatgtactctggaatgtggtgttaaaacagttgggaacggtacgggcatccaattatatttatctcaatcctctggtcacgatgattgcatcgttccttattctggatgagaagattacgttagtcgctttaggcggcgcagcttgtattgtctgcggggtatattgggctgaaaagaaatagagtagataagaaatagagtagattatgagaaaaatgatgaatgagcagcttcctatatcgaagtcatctcctctgaaagctcgtttttatgattatccttattttacttacccgtggcattttcatacggagtatgagattatctatgtcaaggagggcacaggaatgcgttttgtaggaaataacgcggagaaatacgctgatggtgatattcttctgctaggctccgatttgcctcattatatgaagagcgatgaggtgtatcggcaagaaggcagtacgcttcggacaacagggaccatcattcagtttgaaaaggacttcatgcaccacgctttcaattattatccccattttatgaagataaagaacctgcttgaagaggcgcaacgggggatttactttcccgcaggatgctccccgcggctggttgatttgcttgaatcgattccggtggagacaggagtcgatcagattacttctttcctgcaacttctgaaagaaatggcaaacgtcgcttcacggtctgtgctatcgacttccgattttgaaaatgatattatctacgacggatcgagaatagacaaaatcatagtttacctgaataagaactatacacggcagattgacctgaatgaaatatcttctctggcagctatgaatcctgctgcattctgccgcttcttcaagagcaaaacggggaaatcattcaagaattacatattggagatgcggataggatatgcgtgtaaactcttgctcatgggcgatatgaatatttcgcagatcagtgtggagtgcggatttgatacgatttctcattttaataagtcgttcaagaagcataccggattcactccgtcttactataaaaggatgatgctggctgaatagaaatgaatgaaagaaagaggcaaacgggacgtatggacataaaaaaagggtcaacgccttgacccaacctttgttaaccttaaatctaatactatgaaaaacacattgcaaagatacggactattgggaaattagcaaattatccaagtaaaatagtatgttttataacacgttttaatagttttcctttacttgttaagaaatatacccttcttttttaaaaggatgcaacactaattgtgaaaattgaaacgggaaattccgttgattctctgccggaaaactgttatctttgcaaggttaatctcattattcactcaacaaaaaagaaaaggagcgaaccgtgaacgaggaagaaatcgtgcttacccccatgatgaaacagtttctggatttgaaagccaaacatccggatgcagtgatgctgtttcgttgcggtgacttttatgaaacatattctaccgatgccattgttgcatccgaaatcttaggaatcacactgacaaaacgcgccaatggaaaaggaaagactatcgagatggcaggatttccccatcatgcgcttgatacatatcttccgaaactgattcgtgccggaaagcgtgtagctatctgtgaccagctggaagacccgaaactgacgaagaaactggtgaaaagaggtattaccgagttggttacccccggtgtatctatcaatgataacgttctgaattataaggagaataacttcctggctgccgtccatttcggaaaggcttcctgtggagttgcctttcttgatatatctaccggtgagttcctcaccgccgaaggtccctttgactatgtagacaaattgctgaataacttcggaccgaaagagattcttttcgaacggggcaaacgcctgatgtttgaaggtaacttcggcagcaagttcttcacattcgaactggacgactgggtatttaccgaatccactgcccgtgagaaactactgaaacactttgagacaaagaatctgaaaggattcggggtagagcacctgaagaatggtatcattgcttccggtgctatcctgcaatacctgacgatgacacagcatacgcagatcggtcacattacttcccttgcccgtatcgaggaggataagtatgtgcgtctggataagtttacggtccgcagtctggagctgatcggcagcatgaatgacggcggcagcagtttgctgaatgtgatcgaccgtaccatcagtccgatgggagcccgcttgctgaaacgctggatggttttcccgttgaaagatgagaagccgatcaacgaccgactgaatgtggtggaatacttcttccgccagccggattttaaagagctgatcgaggagcagttgcatctgataggagacttggaacgtatcatttccaaagtagccgtaggacgtgtgtcgccacgtgaggtggtgcagctgaaagttgccttgcaggccattgagccgatcaagcaggcttgtcttgaagcggataacgcaagtttgaaccggataggcgaacagctgaatctttgtatttctattcgcgaccggattgccaaagagatcaataatgatcctcctttattgatcaacaaagggggcgtgattaaagatggtgtgaatgaggaactggacgaattacgccgtatttcatactccggcaaagactatctgttgcagatacagcagcgtgaaagtgagcagacaggcattccgagtctgaaggtagcttacaataatgtattcggttattatattgaagtccgcaatatacataaggataaagttccgcaggaatggattcgtaagcagacactggtcaatgcggaacgttatattacgcaggaactgaaggtttacgaagaaaagattctgggagccgaagataagattctcgtgttggagactcagttatataccgatttggtgcaggcattgacggagtttattccgcagatacagattaatgcgaatcagattgcccgtctggactgtctgttgtctttcgctaatgtggcacgtgagaataattatatccgtccggttattgaggacaatgatgtactggatatccgtcagggacgtcatcctgtgattgaaaagcagcttccgattggtgagaagtatattgccaatgacgtgatgctggacagtactacgcagcagattatcattatcaccggtcccaatatggccggtaagtccgcgctcttgcgtcagacggcactgattacgctgttggcgcaaatcggttcgtttgttcctgcggagagtgcccatatcggtctggtggataagattttcacccgtgtaggtgccagcgataatatctcggtgggcgaatctacttttatggtggaaatgaatgaggctgcggatattctgaataatgtctcttccagaagtctggtgttatttgatgagttgggacgtggtacgtctacctatgacggtatttccattgcctgggcaatcgtcgagtatatccacgaacatccgaaagcgaaagcccgtacgctgtttgctacgcactaccatgagctgaacgagatggagaaatccttcaaacgcatcaagaactataacgtgtctgtgaaggaagtggacaataaagtgattttcctccgtaagctggagcgtgggggaagcgaacactccttcggtattcatgtagcaaagatggcaggtatgccgaagagtattgtgaagcgtgcaaatactatattgaagcaactggaatcggacaaccgccagcaaggtatttccggcaaaccattgacggaagtcagtgaaaacagaagcggtatgcagctcagcttcttccagttggacgacccgatcctttgccagattcgggatgagatactgaatctggatgtgaataaccttactccgattgaggcgttgaataagctgaacgatataaagaagatagtcagaggcaaataaaaactgatataacttatgcgggggctgactaaaaagtcgttagtaactttaaactctcctccttccggaaggaggagaatggagatattaacgacttttagtcagccccaacgaagatactatagacttcttatgttgtaagttatagggttacttgccgtgccaatggtatggccttatgcttataccttctttgtataaaaagagaggccggttggcttccatgtgcctttgtttccgtaggtatccttttcttccgtggtataggcaaagttttttccgtctgatatttcgtagatacagtttaagtcatcgctctccttttcatagacataccctatgattgttccgtttccgttcggtgccggttctaatgtcaaacggtgattcttcccgtcggaagacaggtaaagcggtactgtacccggttcgtgtctgacaaatacgcttcctatcacaccttgacagatatcggcctttgcggttaactccttataagaggtatagtagcggtgatagtgcccgtcacttgcctgaaagatgggagccgtttgttgtaaggacagttggtgccttttgatatgggctattaccgcttcttttatttgctgtttctttatggggtcggctattacctcatagatggggataaggtcttcaccggtcagagtagttaaggcgcgattcttttcattggcagattgtatccaggggctgatatccatcggatcgcctgtcagctgatcaaagactttgtaatcagctccttgcaatgacactacaattgttcccccatagttcttttttactgtttcttcgggataagtgatggaaacattgggatgcttaataatgctgctctgatgtgcgcccatccctgtatttgcggttctcaataagttctcttcatcatccgctacgatgctgcgatagagggttttgcttgtataacctaaatgagtgttcaccaatatatgagtaccaaatagttctatgattgtttcaggtgacgcatcttccagctcttgccggaaatcatcggccagccagttggaccaatccgcattcagagtgagtaatctttgaatcactccgttagctcctgaactaccaaatgcaaatgtgtattgggatgaataatcataaggtttctgaaaataagtatgaccggtaatggtagcggtgaacagcaaatcatctttgttttccgccggcaccacaaatttcttatattctgtgattgaccgaagaaactctttcatatcacgaccaatgaagctgtctcctaccccgctcgaacctaccagattgctaatcttttcattatctatcttgctcagatcgagcactggttcttttaccgaattattgtctatgtagctgcccataatatcatatccggcacccagaaaaggctgtgtaagtgacatggaggcttcaggccagctattaccttgtggtacggcagggcttatgtaactgtcattcgtttcctccggaggagtgtaaggtaattcttctttgtcactgcaacttgcgaatacggatgtgacgaaaggtacccatagtagtttgaatagtgtttttgtgctcatatttttatcatttagtcgcgctaaaggtagataaaaggaatgagaaaatacgatttgaacagcactattatttcagaaactcttctaccttcttataaaacaaggaaagatgatgcccgtcaataaatccgtgatgaatcgtcatcgcgataggcatcaccagtttgccttcccttatgatggcttttccggcattcagcaacgggtagttattgccgcttctcttctcctgtgtgccggtgatggaagtaaaatacaggtcgggagtcgcacttaacagaatcagtccgtaatctccgtcggctacttctccgttttctgctgcatacggatcaccgtcttcggggatggcgtcgataattagccttgcttcctgatagaaagtgtcgaaatcgttgtggtaagggaaacgggtggtgaagaacttgccgttctcttttatcttgatgggagacagcatatctatggtgtcatagagcactacacgtccgtccggatcgatgcggtaacgaaactccggtatttcgttggctgcacgcagcacagcataaagataatggagaaagaaagactgtccggcggctttggcacgttgcctggctcctccgcactctacttcggaggtaatggataattggggattctggaagtggcggaagaagttgaaattctccttccgctcccagttttctatatctatgatttgtttcatttctttgctaccttcttccggtcatagaagaacatgaagtagaaaccgatgatgatgaaaggaacgctcagccattgtcccatgttgaacatcatgttgtcttcgaatgcttcctggttctgcttcacgaattcgataaagaaacggaaggtaaagatataagccagacagagtccgaagaagaatccgcgatgcagtttcttgctgtaattcttataaagatagatcatgatgaagaacaggatcagataagctatcgcttcatagagctgtcccggatgacggggaagcatatctacccgttcgaatacaaatgcccagggtacatcggtcgggttaccgataatttcggagttcatcagattcgccagacggatgaagcaggcggtgatcggagtagcgacggcaatcatgtccaccacatccatataatgaagtttcgtcttgcggcaatacaaccaaagggcgatcatcaatccgagtgtacctccgtgactggcaagtccttcataaccggtgaatttccatccgccgcctgccaggaacttgatcggcagaagcatttccacaaatccctttccgctggtcaggtactgtcccggatcgtagaacaggcagtgccccagacgtgctccaatcagaataccgaagaaacaataaaagaagaggggatcgaatttcttctcgtctatttttttgtcgcgaaactggtaatggacaatgatgtaagcaaagaagattcctactgcccataataatccgtagtaacggatagaaatgccgaacaggttgaatagttcgggattcggattccagttgattgataataaaaggatattcatgttggataacggtttacggtttgtaattagtgttttgtgaatttttcggcaaccatccggtaagttggtatgtcgataccttgctcctcggctgctgcgatcatgtcaaacagcaaaccttgtatttccgattcatgtccccgtgccaagtccttttgcatggatgcggtactgtcgggatcgagtttatcaatgactttcaaattgtagctgacggggtcttcgggaaattccactcccaacttacgtcccagtgcggcactctcagtagaaaggccgatgaacgtatcacgtactttccccggcttctgaacttcacccatcggtacatcatagtaagcaccggtgaccgccattgccgagatgaacgaccatttgatgaatgtatcccgattgatgtccggagaaatctcagctttgattccactttcctgaaggtctttctgaatagcttccaggatgccgggagccacctgtgtccctttgtgggcgccatacaccagacggaagattttccccatctgagtgatctctcccgtgccggaaacaaagccgacaatgtagatgcaaccatcgagcaccgttacacccggaacgagacgctgaatgcgtggtcctgtcccgtaaacattcaggatagggatgacgactgtcttctcatgcgatgcccttttgatgagttcggtaatcgaatcgacggaatatcctttcacgcagacgaagatcacatccgcttttcctttgaactcttcggccgtcgtagccttaatctgaagcgtatgttcacccttcagatccgatttcaatttcagaccattggtttgtattgactgcaaatgagctccacgggcaatacaagttacatcttttcctgcaagcgacagaaagcctgctatactgccgcctactccaccggttcctgctatgagatatttcatgtcattgatgcttatgtgataattaataagtcgttagtgattaccgataatcacacattgaagcggaagtgcatgatgtcgccgtcctgcaccacatattcttttccttccacactgagttttccggcttccttgacagccgcttcggagccgtactggatataatcatcgtatttgattacttccgcacggataaatcctttctcaaaatcggtatggatgacgcctgcgcattgcggagctttccatcctttctcgtaagtccatgcacgtacttcttgtacgccggctgtgaagtaggtttcgaggttcagtagtttgtaagctgacttgataagacgtgcgacgcccgattcttccagccctacttcggcaaggaacatctgacggtcttcgtatgtttccagttcggcgatgtctgcttcggtctttgcagcgacaatgagtatttgtgcattttcatctttcacggcgtcgcgcaccatgtctacgtatttgttgccgtttaccgcacttgcttcgtctacgttgcagacgtacatcacgggtttgctggtcaacaggaagagttcgtgagcaatcttttgttcgtctttcgtttcgaaagtgacggtgcgggcggatttgccttgttccagtgcatccttgtattgaacgagtacgtcataagcctgttttgcagccttgtcgccaccggtctgagcctgtttctgtactttctggatgcggctttcgatggtttccaggtctttcagctgaagttcgtagtcgatgatctctttgtctcggacggggtttacgcttccgtctacatgagtcacgttgtcatcgtcgaagcagcggagtacatggatgattgcgtctgtttcgcggatattggcgaggaatttgtttcccagcccttcgcctttgcttgcacctttcaccagtccggcgatgtctacgatttctacagtcgtggggacaatccgttggggatgtaccagttctgccagtgcgttcagacgttcgtcgggaacggtgattacgcctacattcggttcgattgtacagaaggggaagtttgccgcttgcgcttttgcgtttgacaaacagttgaaaagtgtcgatttacctacgttcggaagtccgacaataccacattgcaatgccatattaatctattatttcttttattatcaatgaatcatatcatgtgagcagcgatttggcgctaatctcccgataaaaacagttttgattgccagcctgctcattttagtttgcaaagataatcattttttgagctaatgagggaaacttggtgcactttctgtctttttctgataattgtacaggctggaaaaaggttttgagcaaattgacaaaatgaatttttagtctcttcagaatgccgttttcctgcccgacggcgggaatgggagaaaatatgcgaatgaaaatctgtattttgttcataaatagggtggtatctgaatctttacaatgctaataattagaaagtaatgtccatcttgtcaaatatgaaggcttgatgcgttggataaggctgactgatacgttggatatatatgaccaacacgttggataaggttagctgacatgtcagacattaatgttctgcaggttgggtattaatgttctgcatgttaagtagcgacccttttgcataatcttccaatataatcgaaaggatatgcagatagtctgcatattgatacattgttttattgctttgagagctggctggcattcttctgaaaatgtatctgtcagcagaaacgtcaatatgctttcatactgaaaggcagttccctgtttgctttgtttattgcgttattcgttcttataggagttactttagtatttggcttgatacttcttataaaagatcaggaataggatgaagccgatcagtgcgaacggaacacccgtcagggcgggataacggtagccgctgctgactgccagccctcctgcataagctccgatggcatttcccagattgaacgctacctgtacacaggcagctccgagcatttcgcctcctttggctacacggattatcaatatctgttccggactggatacggcaaacagtcctgcggtgcagaggcacatcaatagcgcagccgcccatttgtagggagagaggaagaagataagcaatagcatcaggcagatcagtgcttgtgcggcagttcctacctttccgggagtgtaacggtcggagagccgcccgctgatcagatttcccatgaccataccgaatccggcaagaatcatcagcggggtgatactttcggcagagaaaccggagacatgagtgagcattggattgatatagctataccagcagaatacaccgccattacctaatgccgtagcacccagaatgagccagggagccggagttttgagaaagcggaactgtcctttgaaaccggtatctttcagcccttctacctgaggaacccaacgccagatgtaatacagaatgacgattccccaaagtcctaccagcaggaaggtagcccgccacgaaagcatggtgcttaaagaagttcccagcggtacgccgaacaggttggcgatggtcattccggctatcatgatggagacagcctctgaacttttgcctttatcggcaagcctttccgcaacgatagaaccgaccccgaaataggctccgtgagggagtccggagatgaagcgggagataagcagcatccagtagttaggtgataatgccgcacagatattgcctaccataatcagcgtgactaataccagcaatatatgttttaatggatatttacgtgctaatgtcaatacaggggcgccgacacaaacgcctagtgcgtaggcggaaatgaaatgtccggcagcagggatgctaatctttaaatctctggctacatcgggcagtatacccatcatcacgaactcggcgatacccaatccgagggtaccgaatgccaatgcaataagacttttcttcatacgaaacctaacctgatgcctgttactttttaccttctttatttagcgtattttttacggggtgcaaaggtaaaacaaaatctctcagaatgagttcgtcaggaacgattttgatttaaatcaatttgtacaatgtctgtgtatgtttaaagtaataggtttgatgtggttgctttatagttagttgcctttctttccaatccttgcaaatatttgaagaatttgcaagaattggaaagagctaagtgattgatttaacaatttcgtcgaacatttctccttttacataccctttctttactttattaagtgatatttcatctatcagttttctttctacaagaccgtcaatatcatttttggcggtagtatgagtaacggaaaatctgttttgtagttcttttacggtgaataatattttaggattatcattaataagcctaagaatatctgcttgacgttcgttgatattatctaacttatagaatacggaagcttgatgtttctgctctaatttacgtttgatataagtttgtagttctttgaaggcaagctccagtactcgcaggttgtaagctatgaaatatcccatgtctttttcatcagcttccgtatataaataagcattctcataggatttttttgatttggcaattacccttgagatggataaatattcagttaaccaataaccgcttttgagcatataccaatagaataaagctcttgcagtacgtccgttcccatctacaaatgggtgcatataggcaatcataaaatgaatgataatacctttgataatcggatgaataaatactttggtattattttcattgaagaatatgcataagtcttcaataaatggaagaatatctttatatgaaggtggtgtatgtaccacctcatgtgtgatagcatcttccactactacttcatcattcgtcctgtatgcccctgcatcggcagggttttctaacgttttttcggtcattaagacatgaatatgccgtaatagctcagatgatagtggggtctgtatattttgggttataaaacgtatggtttgataattattaaatatcatctgttgcgatttgtcctgtggggaaaggctttttcttagcatttccttggctacttttctggttgtcgccgctccttccatttgactggaggatattgcttcttccattaatgagctaatcagatattgttctttgttttctactggaatgattgaattgcttccccaagaaccgccgaagttcatatcaaactcgtggcacatccgttgcatagcattggttatactgatagatatgccgtacttcttccatactatgattcgtttcgctctccgcgatgcttttatgtaacaccataattctttgctggatataccttctggagtcttttgatactttacatcagaccaataactatacttatcattgtttttttctatgattgccttgagtttttcaagcggatcagtgagaagaactttcaaatattcttcctgactaatttgaggagggagttcaatcataatatcatccgtttatattatattttagtctacaaatataattcttttctttccaattcttgcaaattcttcaaacatttgcaagaattggaaagaaaagaatgtgatattgagaaatactgcccgaaaagtatatcattagtaaatttattgctgcttttttatccattcagtcatgtctttcaggacttccggatttattgtctcttccaattgtccgtattcggctaaagttcctttctcacaagtctgaaacaggtggttcagttttggatagactttgattgtcacattcttgtttccgttctcgctgatgtgctgcttgatagcagtcagattcatatcggcatctacctgaatgtctttttctccgtttaatgcgaggaccgggcactttatttttttcagacttgcagtcggatcgtatctcataaagtggagataccacggtgaagtcatggagtttatttgggcagatagttgttgtacggtattcaggtctttcaactgtccggcagacatggttctggtaacatcagcgtaaacttcttttctgatttcatccgccgacttgtccgtttgctgtaataaagagtatctgtagcgaacggacggtttcattgtctgccacaccggatcgggcatcccttgggacttggaaatcaattcaacttgtttaagcatcaagctgtcacctcgcacggcagctcctgccaatgatatgataaatgaaatgttggagtctttggcggcaatatcaaatgcgattgttccaccgcagctatgtccgataatgccgattttccgggtattaatttcttttctgctgcgtagatagttcagcgctgcttccgtatcttttgcgaaatcttcgttggtagcacttgcataatctccttgcgaagcggctgtgccacgatcatcgcatcttagtacggcaattccgttacgtgtcagataatcggcgataacaagaaatggtttatgacccatgatttcttcatctctgttttgagcaccacttcccgtaaccaatactacagccggaaatttattccctttctccggaagggttaatgtgcctgccagagtgattccgtcctgcgtattctttacgctgacttcttcgaccttataaggaaaaggcggctgaggctcctgcgggcgtttaggcccgctaaactctcctttcgtcagattcaatgggaggggcattccttgtgtgaatgtgccggtaatggtttggtcggcattcagctttcctttataagaggcatggataatcggtatctgaacagtcagtgtagagtcttgaaaagaagttgtttccgtttttatatctttggttccctgatcggggctgtcaagagttgtcacataagtcccctgttccgtatgtttgatatggaatacaatggttaacgaaccggcaggaagggagagtttgccatgccatgtgcccgaaatgtcttgtgcggaaagatgtgaaggaactgtcagttcgattaaaaagccgatgaaagcgatgagcatgaaacaacgttttgaagttttcataggaatgaaatttgggtttataaatgacatttgcagatcagagatgtagcattaaatgcctttctttgatgacaaagatatgcttttatattagataacttctttttttgtggatatattcagtggcatgaaccgccattttcataaaggagccattttccggatattcgcaataatattccgtagaaataatgtcggtttctgaaagacttttatctttgcagatataatacatatggcgctatgagaaagattattttgattttcgtgacaattgttcttccctgtttgctttgcgcaagaaatgatgataagagtacagatatgctgcttcgtgagattgacggaattatcaggaaccgtcagacttacggtgcagaaaaagaagcacgtatctccgatttgaagaagttgctgtccgaggctacctccgatgagcagcgttatggattttgcggcaggcttttcgacgaatatcgggcttataatttggactcttcgtatgtatatgcacagcggaagcaggaactggcttctcatttgaacaaacaggattatctggatgatgccgccatgaatatggcagaggtgatgggaaccaccggaatgtacaaggaagctctggaacagttgggacagatagacaagaaaaccctgtctgattatctctatccctattattaccacttgtatcgtactatttacgggttgatgggagattatgccgtcaccgagaaggagaaaaaagagtattaccggatgacggacctgtatcgggattcccttttacagactaatgcctccgactcattgggccatgtgctggtgatggccgacaaatgcaccgtacacgcccaatatgaccaggcaataaccatgctgaccgacttctaccggaaaccctctttggacgatcattccaaggcgctgattacttataccttatcagaagcctatcgcctcaaaggagacaagaaagggcagaaacactttctggctctctcggccatcgccgatttaaaatcggcagtcaaagaatacgtctccctgcggaaactcgcctctcttgtatatgaagacggagacattgaccgtgcatacaactatctgaaatgctcgctcgaagatgctacgctctgcaacgcccgccttcgtacactggaaatctcacaagtcttccccatcatcgatcaggcttaccagctgaaaaccaagcgccagcaacaggaaatgaagatatctctgatttgtatcagtctgctttccgtctttctgctggtggctatattcttcgtttacaagcagatgaagaaagtggctgctgcccgtcgggaagtgattgacacgaatacgcttctgcaagagctgaacggtgagcttcatgactccaattcgcaactgaaagagatgaaccataccctttcggaagctaactatattaaagaggaatacatcggccgctacatggaccagtgttccacctatctggataagatggacttataccgtcgttctctgaataagattgcggctgccggcagggtagaagagttgtataaagctattaaatcctcccaattcctcgaagaagagctgaaagacttctacgcaaactttgatatgaccttcctgcaactcttccctaactttgtggaagagtttaatgcgttacttgtcgaaccgatgcagcccaagcagggcgaactgctgaataccgaacttcgtatctttgccctgattcgtctggggattacggatagtaccaagatcgcccagttcctccgctactctgtgaccactatttataattaccggacacgtgtccgcaacaaggcactcggcgaacgggatgagtttgaggctaaagtaatgaaaatagggaaggtggaagagtaagaaatccactacttttttagcacggtcgctattctataatattcttattattagtgttttatgctgttttgtactgtataaaccactatatttttgctatctggcaaaagaagcgcatttaattgtggatacttttgtttcagtgaaaacaaaaagtaatcctaatattaactttaaattgatgtacatggaacagagtataaagtcgaaaggctttgaacatcgcctcctattaataatgtggggcttgttactatctcttagtgcattcgcacagcagattacagtaaaaggacatgtagtggacgccacgggcgaaccggtgatcggagccagtgtgatagaaggcaagtccacgaacggcacgattaccgatatcgacggtaacttctcattaaatgtttctgctaacagcgcattgaccatttcttttgtcggctataagacgcagactgtttcggtgaacggaaaaaccgcactgaaagtaaccttgcaggaagataccgaagtattggacgaagtcgttgtagtaggttacggaacgatgaaaaagagcgacctgaccggcgccgtatcttccgtaggagtcaaagatatcaaagactctccggtagccaatatcggtcaggcaatgcagggaaaagtatccggcgtgcaaattatcgatgccggcaaaccgggggacaatgtaaccattaaaatccgtggtctgggcacgatcaacaacagcaacccgctggtggtgatcgacggaatccctaccgacttaggtctgtcttctctgaatatggccgatgtggaacgggtagacgtgctgaaagatgcttcggcaactgccatctacggttcgcgcggtgccaacggtgtagtgatgattaccagtaaacgcggtgccgaaggcgccggaaaggtaacggtcaatgcgaactgggcgatacagaatgcaactaaagtgcctgatatgctgaatgccgcccaatatgcagcattgagcaatgacatgctctcaaacaatgacgataacaccaacccttactgggcagacccttcttcattgggaaaaggaaccaactggctcgacgagatgctgcgcacgggagtgaagcagagttattcggtcagctattccggcggcacggaaaaggcgcattattatgtgtccggaggttttctcgatcagtccggcattgtgaagagtgtcaattatcgccgtttcaattttcaggcgaacagtgacgcccaagtcaacaaatggctgaaattcaccaccaacctcacattcagcacagatgtaaaagaaggaggaacatacagtatcggtgatgcgatgaaagcccttcccacccaaccggtgaagaatgacgacggcagttggagcggtcccggacaggaggcgcaatggtacggaagtatccgcaatccgatcggtacgcttcacatgatgactaacgagacgaaaggatataacttcctcgcgaacatcaccggagagatcaccttcactaaatggctgaaactgaaaagtaccttcggctatgacgccaagttctggtttgccgacaacttcacgccggcatacgactggaaaccgaatccggtagaagaatcttcccgctacaaaagcgacaacaaatcattcacctacctgtgggacaactacttcgtattcgatcatacttttgcaaagaaacaccgtgtaggtgtgatggcaggttcttccgcacagtggaataactacgattatctgaacgcacagaaaaacatcttcatgttcgacaatatccatgagatggacaacggagaaaagatgtacagccttggcggcagccagagcgactgggcactgctttcactgatggcacgtctcaactactcatacgaagacaaatacctgctgacggctaccgtacgtcgtgacggctcttcccgctttggtaagaacaaccgatggggaacattcccttccgtatctctggcttggcgtgtttctcaggaagactggttcccgaaagataacttcctgatgaacgatctcaaactgcgtgtcggatacggtgtgaccggtaatcaggaaatcggtaactatggatttgtcgcatcctacaacacgggtgtctatcctttcggaaacaataactccactgctttggtatctaccactctctccaatccgaacatccattgggaagaagtgcgccaggccaacttcggagtggacatgagcctgttcgattcgcgtgtcagcctttcactggatgcttatatcaagaatacgaacgatatgctggtgaaggcttccatccccatcacttcgggctttgaagatactaccgagactttcaccaatgccggcaagatgcgcaacaaaggagtggaaatgacattgcgtaccatcaacctgaaaggcatcttctcctgggaatccgctttaacggctacctacaataaaaatgagattctggacctgaacagcgaaactccgatgtttatcaaccagataggcaattcatacgtgaccatgctgaaagccggttacccgatcaacgttttctatggatacgttaccgacggtcttttccagaactggggagaagtcaaccgccacgccacccagccgggcgcagctccgggggacatccgcttcagagacttgaacaacgacggagtgattaacgacgaagaccgtacgattcttggcaatccgaatccgaactggttcttctcactctccaacaacctatcttacaaaggatgggaactctccgttttcctgcaaggagtggcaggcaacaagatttataatgccaacaatgtggacaacgaaggaatggctgccgcctacaaccagaccacagccgtactgaaccgctggacaggagaaggcacaagctactccatgccgcgtgccatctggggcgacccgaaccagaactgccgcgtatccgatcgatttgtggaaaacggctcgtatctccgtctgaaaaatatcaccctttcgtatacactgcctaaaaagtggttgcaaaagattcaactggaaaacgcccgtatctccttctcttgcgagaatgtggcgactatcaccggatattcgggcttcgaccccgaggtggatgtcaacggtatagacagcagccgttaccctatctcgcgtacattcagtatgggcttgaactttaacttttaaatcaggaggaagaaaatgaaaaagaaactgacttttataatgatacttgtcgtacttgccttgacatcgtgcagtgattttctggataagtaccccaaatacggtgtggaccccgaatcggaagtgaccaatgagattgccgtagcactgactactgcctgctataagacgttgcagtcgtccaatatgtataatcagcgcctgtggagcctcgacatccttgccggcaacagcgaggtaggtgccggaggaggaaccgacggactggaaactgttcaggcggctaactttatagcgcagagcgacaacggttttgccctgtacgtatggcgttctccgtgggtaggcatcggacgttgtaatatcgtgctttccaatctgccttcggctgccatctccgatgagataaaagaccgttgcatgggtgaggcatatttcctgcgtgctcattactactatatcctcgtccgcctttatggtggcgtacctttgcggttacagccctttgagccgggacagtcgacggatattgcccgcaatacggtagatgaagtatatgcgcagattctatcggactgtaagaatgcggtggatatgcttcccccaaagagcagttacggagaaaatgacaagggacgtgcctgcaaagaggcggcgatggctatgctggcagatatttacctgacgctggcgcccaatcatcgggattattacaatgaagtcgttacgttgtgcgaccagattactgcgatgggatatgatttgtctcagtgcaagtatgccgataatttcgacgctacgatcaataacggtgcggaatcccttttcgaagtacaatactccggcagtacggaatacgatttctggggaggggacaaccagtcttcctggctgtcgaccttcatgggaccccgcaactccggcatggtggcaggcgcttacggatggaatctgcctacggaagaatttatcaaagagtacgaagcgggcgatttgcgcaaagatgtgaccgtgttatatcaaggctgtcctgctttcgacggcatggagtacagacgttcgtggtcgggtacaggttacaacgtccggaagttccttgtgtcgaagaccgtttcgccggaatataataccaacccgaataacttcgtggtataccgttatgcggatgtcctgttgaagaaggcggaagccctgaacgaactgggacatcccgaccaggctgccgcacctctgaatatcgtccgtcagcgtgccggactggcggatgtgccgactaccttgaatcaggaaacaatgcgggaaaagattattcacgaacgccggatggaacttgcttttgagggacatcgctggtttgacatgattcgcatcaataatggtaactatgcgattgagttcctgaaatccatcggcaagaatcaggtgacgaaggaacgtctgctgctgcccatcccgcagacagagatggactctaacaatctgatgactcagaatcccggttattaatcgcctttacaatcattcatttagacagatcatatgatgaagaaatatatatatcagatgttgtgctctcttttcatcggcggagcgatggtttcctgcgccgaggattatatggagacggacaagggacatgatacgctgactcttacggtgaatcagcaggagatcgtattgaacgaaaagaatcacagtcaggaggcgttaacgctttcatggactacgggaacgaactacggaagcggaaaccgtatttcttatacactggaaatagccaaggcgggaaccgacttcgcccgtgcctattccgtagatttaggaacgggaacttatcagtggacgaagaaaacggaagaactcaatcagtttctgaacacgcagctaggcgtcggctatgccgaaaaagtatcgctggaagcacgcattaccgctactgttgccggaatggaagaaaaggagcagcgtgccacagttgcgctggatgtgactacttatcaaccggttactccgacgctttacctcatcggagaagctgcccctaacggatggagcgccgatcaagcgacgcctatggagcgcacggacaacggacagtttacgtggacaggaaagctgaataccggtgtattcaagtttataacgacattgggagaatttcttccatcctacaaccgggatgccgctgccggagaagaactacggcttatctaccgcacatcgggcgacgaaccggacgaaccgtttacagtcagcaaggaagcgacctatatagtcaaggtagacctgctcgacctgacaatgaccatgaccgaaacggaaaacatcggatggcgctttgaagaattctatattgtcggctcctttaccggcgacaatggctggggattcgaggcactgtctaaagatgccgttcagatgaatctgttccattatggtgccgtgattccgtggaaggcggacggtgattttaagtttacttccgtgacggacttcggtcagtcggatgctttcttccatcccaccgaagggaacgctccgtatacttccacttcagttgtactgggaggtgaagacaataaatggcaaatgaaggaaagcgaatgcggcaaggcctataaagtgctgttcctcacagccaagggaaaggaaaagatgctgatgcgtccgtttaccccctacgaaggactgtatctggtaggcgatgccactccgaacggatggagcatcgacaacgccaccccgatggctaaaagtgccgacagcccttacatctttacctggagcggtacactgaatacaggggagatgaagatttcctgcgacaagcagtccgactggaacggagactggctgatggcggacaagagcggaaaggcaccgaccggtgaagtggagacagccttatttaccagtaaaacggatgcggaactgaagaatatgtatccggatacagacctcggcagtctggacaataaatggaatattcaggaagctggctcgtatcggattacgattgaccagttgaaagaaacgatttcgattgtaaaacaataaacaagtattcaagatgaagaagataatatatttggtggctgccttcctgtgtctgtcttgcagcgacgatcatgaatcgaacccacagaacggaggagcgtcgggcagtgtgaccgaagtaactccggtgacatcggacttatgcgtggaactgacaactgacaaggctttttataaaccgaacgagacagtgactttcactgccgccgatgccttgcctgccggaacaaaggtacgctatcgccttttgggagaaatagtcggagaagaaccggtcagcggtacgaactggacatggaaggctccttccaccgatttcaaaggatacatggcagaactttaccggcaggaaaacggtacggatgtcatcgtcggtacgattgcggtagatgtatccagccatccggcacgtttcccccgatatggcttcgtggcagatttcgacggagtcaagacagaagagaaaacactggaagagatggcctatctgaaccgccatcacatcaactgggtacagtttcaggactggcacaataaacatcattggccgctgggcggcacacgcacgcagttggacgaggaatatctcgacattgcgaaccgccctgtccatacaagctctgtgaagaattatatcaaggcacaacaacattttggaatgaagtccatgttctataatctttgtttcggggcattgaaggatgcggcttccgacggggtgaaagaagaatggtatctgtttaaggacgcttcgcataccacgaaagacagtcacgacctgccaagcggatggaagagcaatatctatctggtagatccttccgacaaggaatggcagcaatatatggcggaacggaatgacgacgtgtatgcgaacttcgccttcgacggctatcagatcgaccagttgggcaagcggggaacgctttacaactacaacggtacaccggtcaacctccgcgaaggatatgcttcttttatcgaagccatgaagcaggcgcatcccgacaagagtctggtgatgaatgccgtaagccgctacggtgcccgtcagatcggagaaaccggtaaagtagatttcttctataatgagatgtgggcggatgaggcggactttacccatctgaaagccgtcctgtatgaaaacggagtgtatggcaataatcagctgaatacggttttcgctgcctatatgaactataataaggcggatcatcggggagagttcaatacagcgggcatcctgctgacggatgcggtgatgttcgctttgggtggctcgcatctcgaactgggtggtgatcatatgctgtgcaaagaatatttcccgaacgacaacctgacgatgagcgaggaactgaaaacggcaatggttcactactacgacttcctcacgtcttatcagaacctgctccgcgatggcggaacggagaacagcatcgctatgaactgtaccaacggagaaatgaaactcaacgtatggcctccaaagttggggtcggtcactacctacgccaagcaggtagacggcaagcaagtagtgcatctgcttaacttctcgcaggcgaacagccttagctggcgggacgtggacggcaccatgcccgaacctgccctgatcacgaaagcggccttgcagatgaacctgcccgccaaagtgaataaattgtgggtggcatcgccggacgtacacggaggagctttgcaggaactggcatttacgcaggagaacggggtagtctccttcacactgcctgccttgaaatactggacaatgattgtagctgaataaggcagttgcaacggaataactaaaacgataggtatgaagattagatataagtttggggtgtggatgttgtgtctgatgtttccggcgttggtctgggcagaaaacgcaaaaagtatatgtacctcttttacgcagcagggacgtcaggtgacttttcacctggcggacagtgccgcactacaactgcaactttgcagcccttccgtggtaagaatctggttctcgccggacgggaagctgcaacggagaaacgcttcctttgccgtgatcaatgaagaactggaagatgtgggaacggttcatgtggacgaacaggccgcctgctatgagatatttacctcgaagctgcgcatacgggtgaacaagtcgccgcttagtctccagatattcgacaaatatcagaaactcctcttcagcgactatgccgataaaggacacgtaagcgaaggcacgaagaaggtggaatataaaacgcttcgccgtgacgagcatttcttcggacttggggagaagaccggcaagatggaccgcagaggagaatcttacaagatgtggaacagcgataaaccttgttacagtgtggtggaagaccctctttacaagagcatccctttctttatgagcagttaccggtatggtattttcctcgataatacgtataagacagaatttaagttcggaacggaaagccgtgattattacagcttcgaggcgccggacggggagatgatttactacttcatcttcggcaaggactataaggaaatcctgagtcaatatgtaggactgacgggcaaacctatcatgcctccgaaatgggcattgggctttgcgcaatgccgtggcctgctgacaagcgagaaactgagccgcgaaatagccgaaggctaccggacacgcggcatcccctgtgatataatctatcaggatatcggctggacggaacatctacaggacttcgaatggcggaaaggaaactacgagaacccgaaaaagatgcttgccgacctgaaagcaatgggattcaaggtagtcgtatcgcaagacccggtcatctcgcaagccaacaagaagcaatgggaggaagcggaccgtctgggatattttgtcaaggacagcacgaacgggaagagttatgacatgccgtggccttggggcggaaattgtggggtagtggattttaccttacctgccgtagccgactggtggggaacctatcagcagaaacccattgacgatggcatctccggcttctggacggatatgggagaacccgcatggagcaacgaagagcagaccgaacgccttgtgatgaaacatcatctggggatgcacgacgaaatccataatgtctacggactgacttgggataaagtggtcaaagagcagttcgagaaacggaatccgaaccgtcgcgtctttcagatgacccgtgccgcttatgcgggattgcagcgttatacgttcggttggacgggagattgcggaaatggagacgatgtattgcagggctgggggcaactggccaatcagattccggtgattctttccgcagggttgggagtaattccgtttactacctgtgacattacggggtattgcggagacatcgaagactatccatctatggcggaactttatacccgatggatacagttcggtgcattcaatcctttgagccgtattcatcatgagggggataatccggtagaaccgtggctcttcggtccggaagcggaaaagaacgcgaaggaggccatcgaactgaaataccgtttattgccttatatctatacgtatgcccgcgaagctcatgatacgggattgcccatcatgcgtcctctctttttggaatatccggcggatatggaaacgttctctaccgatgggcagttcttgttcggacaagagctgctggtagctccggtggtgaagaagggggcacgtacgaagaatgtctatctgcccgaaggcacttggattgactacaacaataaacaaacagtctataccggagaacagtggactaccgtggaagctcccttgtcgtgcatcccgatgtttgtaaagcagggttccatcatccccaccatgccggtgatgaactacacgcatgagaaaccggtctatccgctgatctttgaagtatttccggcaaggaaaggagaggaggcctcgttcactttgtacgaagatgagggagaagacctcggctatcaacgggatgagtttgccaaaactcccgttcgcttccggacggaggagggtggttatcttctttcggttggtgcccgtgaaggaaaagggtatgcagtgcccgctccccgaaactttattttccgtatgtatctgaagacggctcccaaaggagttaccgtgcaaggtaagaaagtaaagaaggtgaagccggaacgtctggaagagaatccggacgatgacactgaaagtatggtgtggagttgggataaggcgaccggtatttgcagccttcgtatgccggaccgaggggaagaaagtcggatttccctgcgtttatgacttgaactcaacgcctacataaagatataaatttgaagaattgctgtcatctgtcactaaacctgtgacaatagtctgataattaaatcataagaccgtgacagcaacctgtgacagcagcgtgacggaaagatttgccgtcacgctgtcattcatttcagctattaataagccgagtttgttttaaggtatgaaactacagttcccattgcttgaaactttggttcccattacttgaaactgtagtttcaaaggtttgaaaccaaaagttccaagcgtatgaaactatagtttctcaccgatgaaactctggtttcaagcagtgaaactgtacttccctaataatggttggcttgtttatgtctaatagctgtactggccgaaatcaattgatgaactcgtaatccgtcagttggtatcttttctgcttgtattcttttgtccttttaagttttacctttccttttgcagcttccagcgttacttcgttgaattgtcctttttggaaatcgtaacttataccgtcatcttcgagaaggaggaacgttgccgaaggagcgccgtatactttgcaatgcaaattgaatacagtttgagcatccacataggggacaggtgcggccaatggcaataacgttccctggcggacgtagagtggcaactgatctaattccgtcgtaatctcatattcacggttgccttcatatttctcattggtattgaagttgtaccatgttccttcggggaagtagaccgttctcgttttcttgttctgatataaaggagcagccatcaatccgtctcccatcatatactggtcactgatggtgcgcaaatgttcatctttgggataatccatcaatagcggacggaagggaggtactccttctttataatatgtataaaaagcactgtacagataagggatcagctgcatacgcagattaatcagtgtgcgggcatattcttcatacctctttgcttccggcaggaactcgccacgttcgttctttccacggtcgaattgcagccacggagcgtattgcagataccatgcattgaccatagcctgcggagaaagaatcaccgtttgcagacgatggaagaaatcttcggcagaatgtgcctcacgcacttcgggacaccacaacagtcctccgaatgccgagttgcaaagtgcctgaatgtactctttgggatcgtatgtatcactataaagtacggcgttgcgtgaagacatgaacataccggacgaccggtaatcctgataggtgcgggtattcttttcacgatagatactgtccatcgcattcacataaagggaaccgaatacctggtgcatcttttctccgtcgatgcccgaagggaactgtgccatatccgggaagcaccatgtggcggaagcaaaagatatgttcgagttgtcacattcgtccagtttgaagccggagatgccttcttctatcagtgtgcggtggtaatcggtaaatattttgtgtgcttccggctggatgaagtccggtaccagtccgttccatacaaggaaatcgcctgagtagggctccagcgccttccggatgggggaagaaggatgaacatacgcgtgttcccacaggtttactttgtatcctttctgctgcaactggtccagcatttctttgtgccttgggaaacggtcgtcgctccagcgataagaacaggagtaagtggccgtctgccatcccggttcgagtcccagtacgtcgcacggaatctgtttctcgcggaaatagttggcaaaacgcatgacggagtcctgcgtcgcatctcctttgacacggtatttgaatccgagtccccacatcggaggaagacatccgccgccggagaggaggttgtatctcttgactacatccagcacttccggtccggtgatgataaatacctcaatgcctttggcgccgggtacgtcgatatggactttatttccgttgcttctgttcttatacaagtcttccgtggtggtagcaatgtgttttctttcttccgtttgtagttgacgactatgctcggttttctgattggagccgcataggaaagtggtataccgtgccgtgttgaccagaataccgtaccctttggtagagacgtagaatgtctgcggagcatgtgtatatccgagtccgttcagcggattgtcgtttactatcgggcgcttgcgcaggccacgctgaccgaaagtttcgaattgaagtccgaaaccgtatatttgttcgttgtcctccagagggacttcgatcagacagccacggtcggttatctttatttgtacttcgtcggggctgaagggcggctttgcagccggaagttgtttcattgcttctacggcaggtttcccgccgaataaggaataaggggtaaaagtgtcaatttctcccgcttgcagcttgatgattcccggagcaatttcttcttgagcggatgcttgcccggcaaacaggagacctactgtggatagaaaaaggttgagtaatagttttctcattatagtttattttatcatggttatattaaaatagacttttgaaatgcgattttccactaaaatgcaataaaagaatattgcaaatataggaataaaacagatgcggtatcaagtattaatacctgagaagtcagataaagtgacctgtcatgacatatattaatgtttgtgacgggagatattaatatcttctttttttgaccgtgattctaaaaataaggttttatatttgtccttgtttaagaatgaaaaagaataaaaccatgaaaaagaattgttttctccttctctttttgctttgtgcctgcctcgttcaggcacaggatacgtatcgtaccgacaaggatgtaccttacatttccggctccgaaacagatgcttatcgtctggaacgttgtaaactggatgtttattatcccgagaataaaaaagatttttccaccattgtatggtttcatggcggtggtatggaaggcggaagtaaatttgttcccaaggaactgacggatcaaggctttgcagtagtggcggttaattatcgtttgagtccgaaagcaaagaatccggcttatatagaagatgccgccgaagctgtggcatggacattccggaatatcgaaaagtatggcggtcgcaaggatcgtatctttgtttccggtcattcggcaggaggttaccttacgttgattctggcaatggataagaaatacatggctgcatacggagccgatgcggatagtgtagctgcctatcttccggtcagtgggcagacagtcactcattttaccatccgcaaagaacgtggcctgcccaacggaatccccatcattgacgaatttgctccggtaaacaaggcccgcaaggataccgcccctgttgtactgattacgggggataagaatctggaaatggctgaccggtacgaagagaatgcactgctggcatcggtattgaataatatcggcaatcggaaagtctctttatatgaactgcaaggatttgaccacggacaggtactcggtcctgcctgctatctgatcgttaattatgtgaagaggttcaagtaatagacctgtgatatcctttcatttgatatggataatgtgtatatttgcacgaaactcatatcaaaaatgtgtaagttctcacatttcagatatcaaaaatgtgactcggtatgtttgaaagaggaattattcagctgttagcggcttggaaaacggatgtaaacaggaagcctttggttattcatggggcgagacaagtgggtaagacgtgggctttgaagtatttcggtcagaaatactttgaagatgttgcctattttagtctggataaagatgaaagcggactttgtgatatctttaaaacgactaaagaccccgagcgcattatacagcaattgtcctttttgcatggacgaaaaattaatcctcagactactttgctgatattggatgagattcaggagtgcaatgaagcgctgaactctttgaaatatttctgtgaagaagcacccgaatatgcagtggcttgcgctggttctttacttggaatttacctgaatcacataggcaattcctttccggttggaaaagtaaatcatctgtctatgtatccgctgacttttacggagtttctgaatacgaaagatccggcgatgtatcaatatatgtgctctgtcaaagaaatagcgcctcttccccaaatcttcttcgacaaactgcgggaagccttcattgcctattctatttgtggcggtatgcccgaacctgcttctttgatggttgactttaatgatatgcaaaaagtggattcatcgcttcgggatatattgaatgactatgctctggattttgtgaaacatactacacctacgttggcgccccgtatcaattatgtatggaactctctgccctctcaattggcgaaagaaaatcgtaagtttgtttatcaactggtccgtcccggagcacgtgcgcgtgaatacgaagatgctattttatggttggaacaagctggtcttgtcaacaaagtagttctgagcaagtcgcctaggctgccactgaaagcctacgatgatttgagcacttttaagctctatgcattggacatagggttgttgaggcaattgtccgaactggatgcaagtgttttgttgttgtccactcccggatatacggaatataaaggggcattggcagagaattatgtattgcaaagtcttacagcacaatttcaggcttcgttccgttactggacttccggtaataaagcagaagtggattttttacttcagcatggtaatcatatttatccggtagaagtgaaagcagaccagaatataacaggtaaaagtctgattcagtacgagaaactttatcaacctgcttgccggattcgatattcgatgctgaatttgaaacaagacggcaatctgattaatattcctttatttcttgcggataagacgaaagagctgctgaataataacgtgggataaagaatagagagaaacggccaagtgatgaaaaatacaggtcatttaaggaaaatatctgtgaaatgtaacgtttctcatagtctgtgaatcatttattatatcagaaatcggtcgtattggctacatttactccgattttacaaactaataaataaaatagctatgaagacattaagcagaactgtacttactctttttgttttatccttctcctgtttggcagcgatagccggagaagtatcttttaaaataaccaagcaatatctgaacttccccatctcccataaagagaacagaggaaggatgacttttgaagtaaacggcaagccggatttatccgtcgttatccgtctggcgccggatgaagcggaatactgggtgtttaaagatgtgtcggctttcaaaggaaagacgatcaagataacctacgacggcaatgagaagggattgagtaaaatataccagtccgacgaaatcgaaggacaagctgaactgtataaggaaaagaaccgtccgcaattccacttcactacccggagaggctggatcaatgaccctaacggattaatctattatgagggcgaataccacctgttctaccagcacaatccttttgaaagagactgggagaatatgcactggggccatgcggtcagcaaggacctgatacactggacagaattaccggacgctctgtatcccgaccatttaggaacgatgttctccggttcggcagtcatcgactatgataataccgccggattcaataaaggcaagactccagccatggttgccgccttcactgccgccagcagtgacagacaagtgcaggggatagcctacagccttgacaaaggacgtaccttcacgaagtacgacaagaatccggtgatcaactccaaggagaaatggaactctcaggacacacgcgacccgaaagtgttctggtatgcgccctccaagcattgggtactggtactgaacgagcgcgacggacactccatttatacctcttccaatctcaaagactggaaatacgagagccatgttacaggcttctgggaatgtcccgaattgttcgaactgccggttgacggtgacaagaaccacacgaagtgggtgatgtacggtgctaccggtacgtatatgctaggctctttcgacggcaaagtatttactcccgaagccggaaaatactgctataccaccggaagtatctatgcagcccagacctttacgaatattccggcaagtgacggcagacgtatccagataggctggggaagaatctcccaccccggtatgcctttcaacggaatgatgatgctccccaccgaactgactttgcgtaccaccaaagacggcatccgccttgttaacgttcccgtaaaggaggtcgaatccttgtgtaagcctcttcgttcctggaaatctctttcttcggatgaggccaaccgccacctgaaagagttttatgatgccgactgtctccgcattaagacaacgatcaaactctctcatgccacggatgccggattcaaccttttcggccagcgcatgatcggctacgacatgaactccaatactttgaacggtcgtttctactctccccaagacccgaccagcatggagttgagtgccgatatttacattgaccgcacctctatcgaagtctttatcgacggcggactgtattcttattccatggaacgccgccctgataccaacaacaaagagggactccacttctggggaaaccgtatcgaagtgaaagacctgcaagtcttttccgtagaatccatttggtagacggaaatcaaaagctatctttgttttcagttatttaaataggaaagagaatatgaaaacgcgtagtcaagtttttcagtttgagaaagagttgaaatgggagcaccccgctccgggaatccgtcgtcagataatgggatacgacggacagttgatgatggtcaaggtagaatttgagaaaggagcggtcggtacgttgcatgaacattaccacagtcaggctacctacgtggcaagtggaaagtttgaactgaccatcggcgaccggaaagagatactgtcgaccggcgacggctactatgtagcacccgacgaaccgcatggatgcgtctgtctggaggccggggtattgatagacacattcagtcccatgcgggctgattttctggaatagttcctgatgaatggtaggttaccggataatgatggtataaatttaccacatatatggtatttcctgtcaacaaaaactgcactatctttgtaatatcttaaaacaaaggaaattaaaaacagatatatatggaaaagattgcaaggaaattgacggatttggtaggtaacactccgttgttggaactaagtaattataataagagtaacggcttgaaggctcgcctgatagtgaaaatcgaatcattcaatcccgcgggcagtgtaaaagaccgcgtggcattggcaatgattgaagatgccgaagtgaaaggagtcttgactcccggcgcaacgatcatcgagcctaccagtggaaatacgggagtaggattggcattcgttgctgccgccaaggggtacaagctgattttgacgatgcccgatacgatgagcgttgaacgtcgtaaccttttgaaagctctgggagcggaactcgtgctcactcccggtgccgacggaatgaaaggggcgattgccaaagcggaagagttgaaagcagccactccgggcagcgttatcttacagcaatttgaaaatcctgctaatcccgctatgcatctacgcactactggactggaaatatggagagataccgaggggaaagtcgatatcttcgttgccggtgtaggtactggcgggacaattagcggagtaggagaagcattgaagatgcgcgatcccagtgtgaaggcggtggcggtagaacctgccgactctccggtactgtccggcggaaagcccggacctcacaagattcagggaatcggcgccggtttcgtaccgaagacttataatgcttctgtcgtagatgaaattattcaggtgcagaatgacgacgctatccgtaccagtcgtgcgctggcggagaaagaagggctgttggtcggcatatcttcgggagcagccgtctatgcggctaccgaactggcgaaacgtcccgaaaacgaagggaagatgatcgtagccttattgcccgatacgggagagcgttatttatctactatcttgtacgcattcgaagagtatcctttgtaaaggaacgtttttttgaaagaaatatagagaataatcctgtggttacttggcaaaaccgtatatttgccaagtaaccatttttatttaatactatgcaaaacaagacgttagggattctgacgattattctcctgctgttttctgcctgtaaagatgaagaaactcctctctcttcaacgaagcaattaatcagcttttcgattcagaagagtgacaatcaaggtaaaattaagaatgacgtgagaggttccattaaagggaatgtgataacgctgtcaatggatcaatatgatgacctgaagtcattgattgctacattcaagtatgaaggaacgtctgtaagcgtgaatggagccgagcaggaatccggcatcacttcgaatgatttttcccggccgctgatgattctcgtagaagcagaagacggcagcagggaacaatatacagtcgaagttgtcttgaaagatgcgcaggtgttatccgaatttcgctttttgagaaaagataatgctttgctgactgctgatgtctcatgtacgattgaagatgagactattgtatcttcctacacatttccacaatcgaaactgattcctgtctttacgactgatgccgtgaaagtaatggtagatgatgtagaacaggtcagcggtgtgacggaaattgatttcgcctccccggtcacttatcagtttgtgatgcggaatggagaagtagtccgatacatcctgacgttggactttatcctgattcctcagtttacgatcacgacagaagaccctagtgttacggagataccaagtaaggattattatctgtctgcgactctcaccgtggatggcaaagggatttgtgataactatacaggcaagacagaggtgaaaggaaggggaaactctacatggggatatccgaagaaaccttaccgattaaagcttgataagaaatctgagatttgtggtttgggaaaagcgaagaattatatattgctggctaatcatatcgatcctaccttaatgcttaactcagttgccttcaaagtcgggcaattgctgaatattcctttcactaatcatgccattccggtggatgtggttctgaatggcaaatacaaaggctcctatctgctgacggaacagatagaaatcaaagaaaatcgtgtggatttggatgagaataacagcgtgatgtgggagcttgattcctattttgatgaagatccgaaattcaagtccgaagcattcaatcttccggtgatggtgaaagaccctgatttgactacagagcagtttgagtattggaagaaagattttaatgcatttaccgtgcagtttgcaaaggagccgttagaaggaaatatgtatgtggatatgattgatattgaatcagttgcaaaatatctgattacctttaatttggtacacaatatggagattaaccatccgaaaagtatctttattcataaagaggggaagggtaagtatgttatgggaccgatctgggactttgactgggcgtatgattacgaaggtaaagagacacatttcgggagttatgaaactccgctcttttctgatgatatgaatggggtgggaactgcttttttccgacgttttctgcaagatagccgggtgagaactatttataaagaggtttggcaagactttaagtcaaataaattaaatgaactgttgcagtatatagatgatcaggccaagcttattaaaccatctgtaacgagaaatagtgagttatgggaaaacacccgttcctttgatgcgaaagtgatagagctgaagaattggttgaagaatagggccgattatatagatagtgaagtgaatcaatactgatagagtttcatatattagcatttcacttctcagtcattaacacttgacttctcagatgttaatacttgtcgtatcaggtattaacacctgagaacttgagtattaatgcctgatagactgacttataacatcatgaaaaccatgattttgcaggtgattccatgaggtttgtacatctcatggtttttcgtctgcccgcagaccgaaaacttttcctgtcatctgatctacaggtactttccatactttgacattccgtacggcaggatcggaatagctgaactgatccttcgtgtaatgacgcatgataatgtccagtgcatgacgtttttcctccatatcttctatgaattctactttcccacggcacatggcactctccgagcgcatgctgtagctgcaagctacctgcttgtgctgatagacaagtttgtgtccgaggctgaacgtgatacacacgttgttattacgttgcagcatttctatctttcccccttcgggaccggaatggaggtaaagagtatcgttctcataaccgaagttcataggaactacgtatggattgccttctaagtctgttatgcctacaaagcaggcatcagcttgaagaataatggattcgattcgttgcttgtcttcgataacgattgttttcattctaatgtcggtttttacaggtttgtgccaagcctctggcacagttgtgccaccgcattggcactactatgccaagcccttggcacaagcgtgccaatagggtggcacagaagagtatactattaattcgtttttacagtacttgtttctatttctcaatcagcgcaaagtctaattgcttcttctccagattggcacgtgccacacgaatggtgatggcatctcccaggctgtatatcttgttcttacggcgtccgcggaggcagtaattcttttcgtcgaattcataatagtcatcgtccagatcacgtataggaaccatgccttcgcatttgttctcgttgagttcaacgtaaagaccccattccgtaacaccggagatcacaccgtcataaacttgtccgagacgttcgctcatgaattctacctgtttgtatttgatagaagcacgttcggcattggctgcaatctgttccatattcgaactatggtcgcagaggtcctcgtacttgctttcggatacgctacgaccgccgtccatatacttcgtaaccaaacggtgtaccatcatatccgggaatcggcggatgggtgaagtgaagtgggtgtaatagtcgaatgccagtccataatggccgatattgtgcgtagaataacgcgctttctgcatggcacggatggatacggtttcaatcaggttttcctctttcttgccgtgaatatcgtccagcaaatggttgatagactttgatatatctgttttcgttccgcttgtacgtaccttatagccgaagcgggcgatgaactgtgacaggttttccagtttttccggatcgggcagatcgtggatacgataaggaagaactttggcttttttgttcttgggtacacgtcccactttctctgctactgtcctgttggcaagcagcatgaattcttctaccagcttgttggcatccttggactctttgaagtatacgctgataggttttcccttttcgtcgatttcaaacttcacctcgtagcggtcgaagttgatggctcctgctgcgaaacgtttctcacgaagtgctttggcgatggtgtccagcatgagaacttcttctttaaaatcgcctgttttcgtttcgatgatctgctgcgcctcttcgtaagtgaagcgacggtcggagttgatgacggtatgtacgatgcgggagtctcttacttctcctttctcggtgatgtcgaagatgacggagaatgcgagtttctcttcattcggacgcaaggaacagatgaagttacacaagcgttcgggaagcatcgggatggtacggtccaccagataaacggaagtcgcccgcttctctgcttctttgtcgatgatgccgccctcttttacatagtgagtcacatcggcgatatgtacgcctacttcccacaatccgtctttgatggggcggatcgaaagtgcgtcgtcgaagtccttggcgtctttcgggtcgatggtgaaagtcgttaccttacggaagtcttcgcgtttggctatctcttccggagtaatttctgcggggatcttatcggctgctgtttctaccgctttcggatatacgtagggcaggccgaactcagcgaggatggcatgcatttctgttgtattgtctcctgctacaccgaggatgtcgatcacttgtccgataggattctttgccttgtcgggccattcggttactttcacgattgccttgtcgccggtttttcctcctttcagcttctctttcgggatgaagatgtcgttggcaagcgtacggttttccgtaactaagaatgcatacgacttggctacttccagtgtacctacaaaggtatcgttggcacgttccagaatctcgatgacttctccttccgcgtctttattcttccgcttggcgtagaaagtgatctttactttgtcattgttcatggcatgtgccgaattgcgttcggcaacaaagatcggatcgcctccaccttcggggataaaggagttctttccgttgctcttgcgttggaaggtaccgatcatctccgttccgtgattgttgaggcggaactttcctttttcaatttcggaaatataatcgtcatctgaaaggtcgtgtaacaggtcagcgcatagcattttctgcggatgggtagtgagatgcaactccgagaaaatatacttcatactaagcgtttcgctgggtttggcatggaaaaagtctatcaataacgctgccagctctttcttactcattcttttgccggcctttttctctttcttttctttctttttcgccataatgtatagaattgatttatttgaaaattctttgatgggagtacaaagtaaacaaatatttgaatttgatagttatgaattggataaaactttcgctgacttcgctaatttcgtccttattaaaataaaaagtattccttctaaggtgatttaggaggaatgcttataagagagaataattgagaaatgcaaaatggcttttattttatatttattgtatctttgtagcatcattcttttcttatacattgaggttataattaatggagagcatcttaataacaggagcaagcggatttataggaagttttattgtcgaagaggcattaaaacgaaagtttggtgtgtgggcggggattcgtcccaccagcagcaaaaagtacttgaagaaccggaagatccactttctggaactggactttgcccatcccaatgaattgcgtgcccaactctccggacataaaggaacctataataagtttgattatatcatccattgtgcgggagtcacgaaatgtccggataagaatacttttgattatgtgaattatctccagaccaaatactttattgataccctgaaagcgttgaatatggttccgaagcaattcatctatatcagtacgctgagtgtattcggacctgtacgtgaaaaagattattcgccgatagaagccggtgatgtcccgatgccaaatactgcttatggtcttagcaagcttaaggctgaactttatattcaaagtattcccggtttcccttatgttatttatcgccctacaggagtttacggtcctcgtgaactggattatttcctgatggcgaagtccatccggcagcatgttgacttctctgtcggcttccggcggcaggacctgacttttgtttatgtaaaagacattgtgcaggccatcttccttggaatagaaaaaaaagtgactagaagagcttattttctgactgacgggaaggtgtataatagtcgtgtattttcggacttaatacaaaaagaactgggtaatccgtttgttattcatgtgaaatgtccattaattgtgctaaaagttatatctttgctcgctgaattcattgcaacacgttccggcaagagcagtacgctgaattctgataaatataaaataatgaaacaacgtaactggcaatgtgatataacccctgccattaatgagttagggtatgctcccgaatatgacttggagaagggagtccgtgaaaccattgactggtataaaaacgaaggatggctttagacttatttaagcgagtggaaacccggaaggggttgtttgctgtggagaagataacattgatttataatctgttgacctccattttgattctgttcctgtttcagcgaatggatcatccatggcacatgttgctggatagggcgatgatcgctgcaatgacttttctgctgatgtatctttatcggctggctccttgcaagttttcggcgtttgtacgtgttgctattcagatgagcctgctttcctactggtatccggatacgtttgagtttaaccggttctttccgaatctcgaccatgtgtttgctataaccgagcagtttatcttcaatgggcaacctgctatctggttctgtcatacattcccgcatcttttggtcagtgaagcattcaatatgggatatttcttttattatccgatgatgctcattgtgacggtgttttattttatctataagtttgaatggtttgagaagatgtcgtttgtactggtaacttctttctttatctattatttgatttatatctttgttccggtagcagggccgcagttctacttcccggctataggttttgataatgtatctaaaggaattttcccggctatcggcgattatttcaataacaatcaggagttacttcccggtccgggctatcaacatggcttcttttacagtttggtagaaggttcgcagcaagtgggagagcgtcctacggcagctttccccagttcgcatgtcggtatttctaccattcttatgattatggcatggcgtggaagtaagaagttgtttgcctgtctgatccctttctatatgctgctttgcggggctaccgtgtatattcaggcacactacgttatcgatgcgatcgtaggtttcttctctgcattcttgttgtatgttgtggcgacgtggatgttcaagaagtggtttgcgcagccgatgtttaagtaaaactaatctaaaagagaatttactttttcaggaattgtttcgaatatccggaacaattcttctttcgtttctgcccgcaacatggcaatacgagtctctttaaaattaggaatccctttgaacaacggactggcagccaagtggcggcgcacgtgcaagatgcccctgcgttcatcaagcagattcacactgtcaatcacttcctggcgaagtacctccatacaccattcaaagctgagtggcggcaattcctcccctgtttccagataatgctttacttccttgaatatccagggacgtccgaagctggcacgaccgatcatgacggcatctactccgtagcggtcaaaacactccttgcagcgttggggcgttgtcacatctccgttgccaatgataggaatgtgcatcctttgattgttctttacttctccgatcagtgtccagtctgcttctccggtgtacatctgcgcacgggttctaccgtgaatggtcagtgcggcaatgccgcaatcctgtagttgttctgccagatctacaatgattttattgttggcgtcccatcccaaacgggtttttactgtgacaggtattttgactgcgtccactacggcacgggtaatttccagcatcttcggaatattctgcagcattcctgctcctgctccttttcctgctactctcttcacggggcagccgaagtttatgtcgagaatatcgggctgcgcctgctctacgatcttcgcagcttcgaccatcgtttccgtatctttaccataaatctgaatggctacagggcgttcttcatcgctgatactcagtttctgtgcagtcttgctgacagcgcgtatcagtgcatcgctcgatacaaattcagtatataccatgtcagctccgaactttttgcacatcaggcggaaagcaggatctgtcacgtcctccatcggggcgagtagtatagggtgttctcccaggtctatatggcttattttcataatcgatacttctttttgcggtgcaaaggtacggataaaaactgaaagaactatttgttgaggtaagtttcacggatacggattaattcgtacctttgcattctcctatcacatttaaatgattatcagatagtaaaatgaatataaaagattttgaaataatggcgcctgtcggttcgcgtgaatcccttgcggcagccattcaggctggagccgattctatctattttggtatagaaaaccttaacatgcgtgcccgttctgccaatacgtttaccgttgatgacttgcgtgagatagctcagacgtgtgatgaacatggaatgaaaagctatctgaccgttaataccattatctatgataaggatattcctttgatgcgtaccattgtggacgcggctaaagcggcaggaatatcagcggtgatcgctgccgatgtagcggtaatgaactatgcccgtcagatcggtcaggaagtacacctgtctactcaattgaacatatcgaatgcggaagccttgaaattctacgcccagtttgccgatgtcgtagtgctggcccgtgagttgaatctggaacaggtggccgagatttatcgtcagattcgggaagagaatatctgcggtccgagcggagagcagattcgtattgaaatgttctgtcacggtgccttgtgcatggcagtctccggtaagtgctatttgtctctgcacgaaatgaatcactcggccaatcggggtgcctgtatgcaggtatgccgccgttcttatacggttcgcgataaggagacggatgtggaactggatatcgacaatgaatatatcatgtcaccgaaagacttgaagaccattcattttatgaataagatgatggatgcgggtgtgcgtgtattcaagattgagggacgtgcccgcggtcctgagtatgtgcgtacggtggtggaatgttataaagaagcgataaaggcctatctggatgatacgtttacagacgaaaagattgccgcttgggatgaacgtctgaaggcagtctttaaccgtggcttttgggatggctactatctgggacaacgcttgggcgaatggacacggaattatggttcggccgctacggaacgtaaaatctatgtgggcaaaggtatcaaatacttctccaatatcggtgtctctgagttcttggtagaagctgccgaagtcagtgtaggtgacaagctgctgataacgggacctaccaccggcgcagtctttatgacactggacgaagcgcgtgtcgatctgaagccggtagagacggtaaagaaaggtcagcgtttctcaatgaaatcagagaagatacgtcccagcgacaaattatataaattggtatctaccgaagaattgaagaaattcaagggacttgatgtagaacagaaaagaggataaacgatgagccagtatatctacgaattggagatgaaggtgcgtgattacgaatgtgaccttcaggggattgtcaacaatgccaattatcagcattatctggagcatacccgccacgagtttctgacctcggtaggtgttagttttgcggcgttgcatgaacagggagtcgatccggtagtggcacgtatcaatatggctttcaagactccgttgaagagtggggatgagtttgtctccaaactgtatatgaagaaagaaggcatcaaatacgtattctatcaggatatcttccgcaaaagcgatcagaaagtagtagtgaaatccactgttgagacggtatgtgtggtaaacggacgtttaagtaacagcgaattgttcgacaatgtctttgctccatacctgaaatgaccgataacgaacaagaacaaatatatagcatcgctctgacaatggtgcccggtatcgggcacattggagcgaaacgtctggtagagggcatgaagagtgccaccgatgtgttccgcttcaggaaagaactggcgcagcgattatccggagtacatgaacgggtgtcgggtgcactggactgtccgtcaattattgcccgtgccgaacaggaacttgtattcctgcaaaagaatcatatccagtgcctgacttttcatgatgaggcgtatccttcccgcttgcgggagtgtgaagacgctcctgttgtactgttctataagggaaatgccgatttgaacgctctccatatcattaatatggtgggcacccgccacgctactgattacggtacacaactctgtactactttcctccgtgacttaaaagctttgtgtcctgacgtattagttgtcagcggccttgcttacggcattgatatcaatgcccaccggagtgcattggacaatgacttgcctacggtcggcgtgttagctcacggactggaccgtatttacccttctcttcatcgtaagacagccgttgaaatgcttgataaaggcggattgctgacagagtttcctgtcggtacaacaccggataaacacaattttatcagtcgcaaccgtattgtggccggtatgtgtgatgctacgattgtggtagaatcggctgccaaaggcggctctctgatcacagccgagcttgcggaaagctatcaccgcgactgtttcgccttccccggtcgtgtgaccgatgaatattcaaaaggatgtaaccaactgatccgtgacagtaaagcatcccttctgttgtctgccgaagacttggtggaggcgatgggatggacgttggattcacatccggcaaaggtagagaatgtacagcgcagcctgtttctggaactgacagaagaggagcaaaagatagttcatacgttggaaaaacaaggaaacttacagattaataccttagtggtagagacagatattcccgtacataaaatgagtgcaattctctttgaactggaaatgaagggagccgtacgggtattggcaggaggagtttatcaattattataaatctaataaccaacctaaaacaatttgaaatgaaacgacatttttgggcattcatggcaatagtatgcctgttagccgtccagaacacacaaggacaataaatggttcttgcacagaaaaaaatgcagttttagagtgtgaaaagtatgtttattgttacttcattctgttttttctcctatcttagtggcataataaaaaacaaacaactatgaatcaaacacgttgtatcgtaattttgtctattcttgctctttttgtagcaagcgtatctgttgccggaaatatctctttgccggatgcttctcaaaaggtttttgaaggaaaaccatgtattaactctccccgggcaattggcaattatcctgccagtcctttcctcttttatattcctactaccggtcagcggccgatggaatggagtgcggagaaacttccgaaaggattgaaactggattcgaaaacagggattatcacaggatcagtagcttctaaaggtgaatataccgtcactctaaaagctaagaacgcattggggaccagtacggaaaagctcgtgatccgcattggtgatgacctgttgctgactcctcccatgggttggaacagttggaatactttcgggcgacatctcaccgaagagttggttttgcaaactgcggatgcgctggtagccaacggaatgcgggatttaggctattcctatattaacatcgacgacttctggcagttgcccgaacggggagctgacggacatttgcagattaataaagataagttcccgcgtggaataaagtatgtggcagattatctgcacgagcgcggtttcaaactcggaatttattcggatgcagccgataagacttgtggcggtgtatgcggcagttacggctacgaagaagtggatgcgaaagatttcgcttcgtggggtgtcgatttgttgaagtatgattattgcaatgctcctgtcgaccgggtggaggctatggagcgctatgcaaagatgggaaaggcgttgcgtgctacgggacgttccatcgtgttctccatttgtgagtggggacagcgcgaaccttggaaatgggcaaaacaggtaggcggacatttgtggcgcgtttcgggagatataggcgatgtctggaaccgggaagccaacaagttgggcgggcttcgtggtatcctgaatattcttgaaatcaatgctcctttgagtgaatatggcggtccttccggttggaatgatccggatatgctggtagttggtatcggtggtaagagtatgagtatcggatatgaatcggaaggttgcacccacgaacagtataagtctcattttgcattatggtgtatgatggcttctccattactttgcggaaatgacgtgcgaagtatgaatgacagtacattgcaggttctgttggatagggacctgattgctatcaaccaggatgtgttgggcaagcaggcggagcgcagcatccgtgcagatcattatgatatttgggtaaagccgttggctgacggtcgcaaagcggtagcttgttttaaccgggcggatactccacgtactatagaattaaattcaaaaacggtggaagacctgtctttggagcaggtgtatagtcttgacagccgttctatggaaaatgctgcgaataacataatggtggacttggcgccttaccaatgcaaggtttatatctgtggaaagccgaaaaaatagtcaatgacagtactggaatgacagtaataaatctctgaggtaaaataaagaaaggttggggcataaaaaaaggagcaacgccttgctccaacctttgttaaccttaaatctaatactatgaaaaaaatcacatgacaaatgtaagtcttcttgctattccttccaaataatattcttgtatttgcgtctcttttgatttctttcacggattttcactgttatcgcacacaatgggtgtaaaatagacatatttcaatatagcttatagtttggcgttataaatagtttccgtttccgaaagccagcatccatttagtaaatgcacgggtttcataatagccggataaatcggatttttccaataagaattattcttgtccttttcttttttgcattttggatgattgttgtgcgcttatgacggatgaaacaattatcaataaggataaggcagtgagtttcataagcgaatttatatttagtgtatcatagaacggttatagtgtcgctcccttatccgccacaatagctcattcagagaaatgtttttcacttgtggcgataatagttgatcggaagttttacttgcattatacccttttatgggtaaattattagaatgtgcagttttactgaaatccgaccaggcatgtatgattgtccaagataatggattctctttatctttttgtttggacgctttagctgcatcccggttaatgagagctgctacataatccggactaccacacaatggattatcaaataatccggaccagatagagaacttggcagtaactaccggaatctcaatattctctttgtttttcacccatattatatcacctcccatattatacggactgtattgaatggccaccattcctgtcaacccttctatctcacaggcatatatctcataggcccgccgggcctctttgctgaatacatccttgcagatgaatccgaatattttgatatttaatttcttgaaatgccagttcatacgctgtgcaaattcaatcagaagttcttcccggttgggacggttttttgcaaattcatcaggatattgataacctcctccatattctatcacacttgagttgtctttcttcatggttacaaaacggttccaggtggaagtactaactactgatagattaatagggcagagagtccatgaaaccggagaacgatttctgtctttattgccatagtacaccggactatcaaggaattctcccattgtccattgcatattatcgccgtcactaattacaaacgaatggaatgctgaattatcttcaaaatctatattttctttttttatttcatgtataggtaaaggatacattttatcggaagctgccatgataacaggaaggttgcgacaccagtttgaagcggtattataatgtccccatcttgtgatagcccctgtatattcatcttcatttccataattccagcctaatatgggtgaaagcggagtaacccattccagtatttgttcggaaaaaggtcccgttccataatatagcataagtttttgggctatagcgatatctctgcagttacttacttttgggtcgatgctaagagctgaacttcgattaagttgttttttgcaacgtttgaaacatgattccggagattcattgcgtgcgtcttttagtttctttaatccggactgtttgattcgtttctctaaagattcttctactagtacacctttcagaaggctggcatatactgttgccacattagctgaataattgattccttctcttcgtgagtaattttctcctgttgaggtgtcgtttttatagagtacatacccttttataatcttttttttcatgagatgttccaggaggtcccagatatccattcggattactttagtgatattcaagctttcctgtgagctttttaaaatcttatgataggaattgttatttatttctatccagatcatttcatcaaaagaaccttcgttcaccgcttgtccgcatagaccggataatgactctaaaagcatactttctgctctactgagtccttccccattgcataggattaattgttgaggtgctttttgtataaaccagccatgtctgccattataggcgaatgtcataatggaggataataaacaaataataagtgcggatagtaatttgattttcatgatcggaatgtttaggattaaaaagagcttttcccgaaacagatcgggaaaaaggctcttttctattttgaagttttacagtgttgttatcttatcatttagagacttccaatggcaatgtccgcatttcattagctgtgctaatgtcgtcaatatagttgtcggatagagtaatagcgaatactgcgatattctcatctttaggaagtaccagtgtgtgtgcctcttggggaagctcgatacccaatttatacatatatgtgtagatataggtgtcattccctttttcagtgtgtcgatgagaaccgatgtaagcgagcgaagcgttgcgaatataaccgtcgctgacacctttatgtccccattgtccgtagaaaccggagtaataaggtatttcaaattcatgtgatttaccattaacaaggaatgttgatttgcgatccttgtctgtagaggcagccagaatatatagtttctttcccgctgcttctttgggtagctggattgtatctcccttacatttgataacattcttattttcatggtcagcaatgctgaaggtgatattatcacaagttactttatcaccaattaattcagcagcgaaactatttccttttttatcgaaagaaacagtataaccaaagttttcaggagtgaaagctttgctattaaacggtaactgaagtggaatattttttattggagctgcttttacatttccttttttcaagcggacagtgaaagttttgggtcgataagatgccatatcaaaacataatttattgttctgtatagtgacttcacctattttttcttctataccatttgtttcataggcggactcaatggcgtcagggaatgtaatttctacattttgtgcagatttaccttgcatctcgtataaacggatgatgtacaaatcactttcttctgctttttttagggaacgaatagccacttggggggtatttacttttacgaaagaatactcacgccctaatgcacctttatgtttgggggtgttgaatacagccaagtgactgttcagagactctgccaaatgactgattccggcctgcaatgcttcgttctgatgaccgacgattgaataagtgaaggtatgatgaccaaagtcttgctgctcctggtatttatatctgtctttggtgctaggagcatggagtagtgtcaggcgtagagtgttatcattgggtttatcccatccatacttacaatcattcaggattgagattccgtaacttttatcgggagacgtaatgtctgcccattgctgtgcatatacttcataagcaatatctgtattgttcttacgttttacagttccgatacccaaatcataaacagcttcctggttttttacattcatcggaaactctgcctttaatacggcgtcttttgttgaccagtctatttcattaatgatatcgattcgttcatcatttgcaccttcactcatgcggatatattgtacgaatttcgaagatttaaaagtgcgttcaatgcgaagagctgcataacaggggccctgttcttcgatactgatacgaacattttccgagattggagttccgggcttatttatagtcttcttttgaatctcccatgcaggccattctttcgattcattgcctatgagcaaagccagacggaatgccttgccctgttctaccagttccttattactacgtttgtcaacaatagaaacaatatcgccattagtatctaaagtcagtttatagatgctgttttccaaagaattttgagttgcttttaagaaggaacccttattgttttttccaaaacggacatcatatacggagcagcttaatggagctacagaagcactaaaggcaatgtgtgctttcccgttttcccaattaagtaattgtgccggaacttctttgccgttggcgtcaaaaacttgtactccagcaggctcctttgagatatttatataggcttctgccagttctttccgttgggcggccattgcattataaacgatgagtgcagttccttttactcttgtatccaagcaagaagcgagagaaccgactccggtacggatgatatcattaaactgcgtttgagagatcagttcatcattccaggaataggtataggcttgaggaagactcgttcctgtgaggtcatcgtggaattgatgccagataaaccgacgccacgcatcagtcagcgtatttgccggatagcttgctccgtcaatataatcagccattactgagattcgttcggctgcatcgcctaattgttcgttccgacgattatataatttcatagctgcctgcgaagtataacagccggtggcatggatgtccatcagtaactcaccatcgtatacaggaagttcaggatgattatcgaatggcagatagtctttgtataactgatcggaagtagcactgataatttcaacttctccactgcctttaacacctttttctatggaaacaaccgaatttatattagcagaaccacctcggtctcctgcgccatagtaacggtatgcagtgttattggctccattttttgctgtattttttaggtcgttatcttggctgatatctccaccattccattcgtgaacatagtttttgccatttaaagctgccatgatgcgtgaaccgtctaccccttgccatagaccgatattgaatggcatcttggattttccgtgcatattatggtgtctccattgtaatttttgcgttgagaaaccaattaagccacaatgtgctgcaatagtgggcaatgtataactgaatccaaaacagtccggcaagaagatatctgtagatttaattccaaactcttgtttatagaattgttgtcccaacagaatattgcggaagaaagattcgggtgaaggtacgttagtatcattggcatcccaagagctacctgagatatgccaacgaccttctttgatatattttttcaccagttcatactcaagcgggtaatactctttcatccagttgtatttcactccgccttcaaagttaaatacataattgggataatgctgaaacagatagaagtttctgaccagtgtatgcttgaggtattcgtcaatggttgtctgtacatcccagttccactgagtatccaaatgcgaattcgagactatataagctttgtactttttttgtgcctgcagcggactgagtcctgttgcagcaaatagtaaagctaataaaatggttctttttttcattttgataattcctttatttctatattaatacctatttattgattgtgaatttaccttcaagcttgatatcctttgaagaagctccgatcattactttgaatgtacccggttctacctgaaatttcatatttttgtcccagatggcgaggtcttgtgggctcagtgtaaaggtcacttctttttcttcgttcggttgcaaggtaattcgttcaaagccgcgtagtatttttacgtatgttgtgacgctactgatttcatctctgagataaagttgtactacttcatcaccaattcttttacctgtatttttaactgtacagctcactttcacttcccctagtactccttgttgttctggagatattcttagattgctgtattcgaatgtcgtgtagctcaatccatgtccaaatgggaaaagagcaccggtaactgaagtgccgcagccgctgtcagaccctggcttgaatggaaaggcaaaaggtatttgtcctactgactttgggaaagtgactgctaatctacccccaggattattatctccaaagattgtttctgcaactgcctgtccgcagaactctcccggaaaccatgcatggagaatggcaggtacatatttttttgcataattaatgctggaagcacgaccgtcaatcattaccagaatggtgggtttccccagcttgcatacagctttcagtaattcttcctgtctgcccggtaagtcaagacttgtgcgtgaacgctcttcacgcacagtaacctcactacctcctaataccataattacaacttcggctgattttgcagcttcaattgcttcatccatcatctgctgctctttgggcgttatatcaaaaggtagaacttcactttcaggaaaatgtggatccactatttcacatccctttttatataccaccttagctctcggcagggcttctttaatacctttgtacactgttttgattggggcattggaaggaccgtaacggcagatgagctctttttgctcatctgcgttcggacctattacagctacagatttcaatgtcttttgaaggggcaataggttatcctgattcttcaaaagaacaattgactgacgggcggcctccaatgctactgcctgatgttctttgcagtgcactattttatccgctaattttccgtcaccacggtaaggattatcaaataaacctaaccaaaatttgacatacaaaatctcacttacgcgttgatcgatagtagcttgtgatacctttcctttggcaatagcgcttcgcaacggctttatgaagcctgccggagaactgaagttagtgcgtacatttagtcctgcattgaccgattgtactactgcttcttcattattatcagcaactttgtgtttgcctgagatgaattcgacagcatcgctgtctgagacaacgtatcctttaaatccccattcctgacgtaaaatctgcgtgaggaatcgataacttccggtaataggttcaccgtcataatcattgtatgagctcataactcccaatgctcctgcttcctgaaatgcaacgcggaagggctcaaggtagagagtacgcatttcacgcggagccacgtgcgggtccgtacgcgtacctccgtcacgtccgcccactggaatactatatacggcgaagtgctttggagtggctaccagcttgtgtttctgcaaactttgaatcatctgctttcctaactgtcctactaggtatggatcttcgccatagcattctaccgcacgtccccaacgagggtcttgtgctatgtccagaataggagagtagatatttgtatatcccaaagcagttgcttctttagcttctacttcaccaatccgggcaatcagctctttgttccatgtacttccctgcccgcattgggcagggaaaaaagtagccttctcatgacaaaccccacgaattccctcattagtaaagtctaccggaattcctaatcgtgtttcttcaacaaaccagcgttggatatcatgtatagctttaacgtgtttagcataaggaaatgcatactcagagccgaacttccccagtccgttatgctcttcgtcaatgtttcctataccgtctttccatatttccgacttccatttttcagttggtaatgcgtcggctagaacacgaccggaaccgtagagagttgccatctgacaagtcttttcatccatattcatctgacttaacaggtctttgacgcgctcctctatcggggcagacgggtcttcatatatgtccatcttgccatttttattaaaatcaatccatccttttcgatagatatcgtctttaggacctgcctgagtgattgccgggatagacaacaagcagcttagtaatgttagttttagttgttttttcatctaaaaggttttatatattgtatagttattgttccagttactcttcttccactttaacattaggatagtcacttattaatacattttttatttgagtatgtgtgccttcatacacgattgtgcgccgttctccttctgtcaaatctttgtatttatattttaaatacaaaacactggtctgtacataatatcgggtatcagtatcgtgtagtacatactttcttgtaagagtactagtaattggttctagccctaattcgacatttctggcagtcagagttatatgttctttttcatcaaagctaagattaatagcataatctttataattagggtctgtgtcctgattggtattaccggcatacatatagcacgtattaattgatgaggcatataatttggcactgccaacagaagtactctgacttgttccgtcaattgtaatcttaccagaccctgagaatgttccggaaaacctgttcgtaggtaaaatgtaagctaataatttgctatatttgcttggtccaaccgattctccggtggaagattctattttcaagggtaatacatagtcgttgtagatattttgaatcttatccaattctatctgaattttggctgtcgttttgtattttcctttaggaatagtatatacttcctgatcgaaactataacaattggttggaagttctatataataggaatttatttgatttttaaatttgtcgaagttataatcggctaaagtatctgggtcattagttattttaagagttatatctttatcattctcagaagttccgttaataccgaagtcaattaataattcggcaatatttccatctttaatctccacttcacaggtttgccatccattttccaccaaataggaaaatttgtggaatagttcgttgtttagttcatcttgacaagctgtgaagatgaatattcctaaagtaatggatattatgtttattattcttttcatattcttttttgttttaattaccattctgggttttgtgtcagattgacgttacgttttaattcagcagttggaaaaggccaaaggtacattttcttcaaaaagactttgggaatagcagtcactgcagttgtaatatagaatccctgtcttgattcgtcgtcctttgtaatgttgatgttacatcccattaatgcctgattttcctcttcttctgcatctttccatcttcttaaatcaaaatagcggaaacagttttctgcaaatagttctatgtgacgttctctttttagtacttctttaaaatttctataagtattgtaagtattatcatcaaaatcaggtaagccggcacgcattcttatgggtttcatcgcttccctcattttgatgggatcacgtttgatttccacttcttggtcattgaacgtttgcatagtatatgtgtttccactggttaactcattgagagcttctgcataaatgagtaaaacttctgcataccgtatagtcggttctgttttatttgttctatatccaccctcagaataagagtcttctttgttgtagtattttttgaatcctatgccggtcaatggacagttctctgtaaatccttgtttaccatttacttcatctctgtaataccaacattggaaatttttctcactagacagcgaggaactttcacattcccatgtagcaccattaaaaccaacacaagcataaaaacgtggttcacgttttgcatacatcagtgatacacctactcccatgaagggggctccattcattgtttgcgggtcattagctgtttctgtgaatccttctcttacataatatcctgttgtttctgcctcttctatagtttgtccattgttcatgtaataagtatcgaccattttttgagtaatagcgactttgttatctccgtgggcagttctgggcatactttttttattaaagaaatcttcgataccacaatttcctgttgctttggttttagtgaatattaattcaggatttttggaaccacgaattgttccatcaaacatttctttataggaagcataaggatctatattgctccatccattgggaaattcttcattagaataagtttcatgatagggagggcgttcatatgcaggcacattatttttgggctctactgtatataagctgtattgctgtagattaatcacatcttctgcggcagcagcggcccgtgcccattttgattcatcatattcttgattatatagttgtgtgccgtccaggtttttaatattaaagaaatcagtatttccattattcataggactggccgcatataatagtattctagctcttaatgctaaagctgcacctttggtagggcgtcctaaattattaatggtacgtgttcttggcataacacgagcagcgagctttaaatcattgtcgatgaaatcgatgatttcatcaaatttagcgcggggcagagataattcttcatatgaaagactgacatctaatccatgttcaggaattaaaggtacaggaccgaaagttcttattaaactccaataggcaaatgctcgtaaaaaacgggcttgtccctgcatatccgaaatgtcctcatacgtaagttccggacactctactactttgtcaataaatgtagaggatttacgaatacattcataggttctatttaaatggttttcgtaaatagggaaattactggcactataattacagttctgcagagctttcccgtccgggtgaactaaatcatcactagcccacatcaatttggaaccgaactctgttagattgtcttgttttaaatagtcgtatgtattggatagccatccttctacatatactcgtttggagaaagcggaatctaccgatagcatatcatagaaatatttatctacgtccaggaaatctgcacatgagtgaaaggataatgaagcgcagaaaatagtaatgaataatattatctttttcatatggtgttttatttagaaacttaatttaatatagcaagagtaggttctgtttataggataagcatttccacttcgaactccactatttttttcatcagtagttgcattctcaggatcccacagtttgaatgggctccaagtgtgtagattttcacctataaatccgatttgcatattgctaacaaagaacttacgagtaaaagttgtaggaacattatagcgtagttcaatgtttttaaggcgaatatagcgtccatcccttaaccagaaagttgatttctgattgttgttgtcattattcccccaggttaaacgcggccagttagcattcggattttcggtagaaacatctccggagatttcacttgggatccatcggttgtcatccaccatagtctgcagaatattaccggtttgtccatttcggaatgcgtgtggcccatttccaccgatgaagaagtcacattttcctgaaccttggaacaggatattgaattcaaaattcttccaacttgtacttaatcccataccatactggacccccggaacagttctataaccaattggaacaatatcatcattgttgaccactccatcaccgtttacgtctttatatttgatatctccgggaagtacctcttttccgccgaagtcttgtcttggactactgcgaacatcttcctcatctttgaataaccccatagctattaagccacgcgtttgattcattcggaatcctttttccattttgtaccataattcgttggctgcctcatctttatccagaatctcagtattctgataagtcatatttgcacgaatagtgaattttacttgtccgatttgatcggaatatgctgcattccagtcgaatccgtaactcttcattttacctacattagccattggagctttatctgccagtcctgttgtttcaggcatatgactgcgtgtcataaaaatatcatctcgtttatccaggaaaatatcagcgactcctgtgaatttaccgtggaataaacttaagtcaaatcccaggttatattttttagcaacctcccaagtcagattaggagtgccaatagtgccatttctgtaaccttgtattttgtttgttccaaattcaccaaatgagtagtcaccatccggatgcgaatttaccaatccaatgtatggaaaacgacgtccaccgataatatcatttcctacctcaccataagaagcccgaattttaagcatttctacccatggagcaatcttcttcataaacggttcttcagagataacccaaccggcagagaaagctggaaagaagccaaattgcttccctttttcaaagttttccgaaccggtgtatccccagttcgtttctacaagatatcgatctttgtatgcgtaagtgaatcggcctgaataagccagatttcgcttcggaatagattcgataatgtctgtgcctaaattggtatcagatttttcttgtaaatagaccatagcaaatgccccaaaacggtgcttttgattaaatagtctggaataactgagagaggcttccgtataatatcgtttatttcctttagtagttgattcctgtcccattaactgtgctgtctgcactcgttttaaaataaggtttccgtccggatcacgatatttttctgcttcccataattcaggagttttaattcgcttaatttcattttcattgtatgtatcaaatgcaaatgttcctacaaatttcaatccttgagtaatgaaatccaagtcttgttccaatctgatattagtttccattttattttgccagatagtcttatagcctgttttggtcatataatattctggtgttttcactccatctacggatggttcctcaccggtcgagtatttgcggggaatactcagtggagtcaatctggagaaagatccccagatgtcatctgtgctgctacctggttgagtgcgattaattaggtagccgccgattcctactttaacaagtgttgttttagtgacattcatatttacgttggcacgataattgaatcgttcgtaagttgtgttggtattgtatttattttcgacactcttacttttataaatacctgcctgactgttatatcctaatgaaacatagtatgttacatttgttccacctccacttaggttaatgtttgctatgtatttgggagatacttttttcagcatcaaatcacgccaatttacatttgggaataaatccggatcgagattattctgtataatatctaactcttcacgagtatagtgaggagattcgtatctgcctatacgggcttcatttgccaagctggcataagtaaaagcatcagcatattcgggcatcgggcctctggcgtctaatcctgctaatacttttgcattaatttttacttttccggcaactccctgtttggtggttaccaataccacaccatttgcaccacgttgcccgtaaatggctgtcgcggaagcatctttcagtacggaaaagctttcaatatcttcaattggaatttcattaaagcttctttctactccgtctaccaaaactaatgctccctgatttgcaccgaatgtgctgattccacgaatccagaactcggacatatcttcacccggttcgccagaactctgtactgcgatgattcccggcactactcccgccagagagttggtgatattggaacttggtgctgttaattgggctatatctactgtagtataagctcctgtcagagtcttcttttgctgatgtccactggctgttacgactacttcatcgatagtctgattatcttcttgcagggtgactattgcttcctttttatttttaatttttataacaggtatttcctgggtagtatatccaatataagaaataaccaatatgtcgtattcccctactttgattttaaactttccgtccatatctgaagttacaccgaggcctggctggtttttagctataactgttgctccgataataggattacctgttatgtcttttatgattccctgtacttctggtgtattattctctttttgtaattgctgtgcggagatattatcttgtactccccatagtgttgtgataaggagcagaatgaatattcgtttcatgttattcatggataatttatagatttatatgttattcgataactacatttctgacgcaatgatttcctctgtccgcaacgattaaagcgttacctgagaatgttacggcttcaggttcatagaatttagctttatcgggtaatccgtctgtatgacctgatttttgaggttgtccggcgtatagggttacttcaccttccggtgttatttttcgaatgcagtgattcattttatcgggaataagcaaattaccttcaggatccaggcaaggagtacttggctggttaaaacgcgcacctgttcctttaccggaagcatatcctgattctccgtaatcaccagcaaatagctccggaataccaaatgtatgtgttgccgcattataagtaactctatatatacaatgctttttacgggctataatatagagaatatcacctgttttattgaaaagtaagcgcatttccatatcgttataaccttcacggacaactaacattttctcataattaccattcccggtatgacgataaacggctccttctgaattgtggtcaaaaaagacttctccggttttaggatgtacagcgactgaattggttccagctttagggatagtaaccaatgctttggtattcacaaaattagcatcacgtgtagagaatactatatttacatcagtctttacatcactacctgtccagcggttgggtataaaaagagtatcctcatttaaactgaaaacaactccgttaggtgattggaatactccgttattatcataaaccagtgtttccacattcccattggaagcttttctgagcgcaccatttttgctttgaccccgtccttcgtctacaaaataaatggtaccatcattatcagtaacaatttgccatggtcggcgtaataaagcttctgcatatggaccgtctaggcgattatcttctgcagcctttcccggtacaccaaataaagtactcacattacttttgaatagatatctgaattctgtttcagaagtaaattcctcgaattcctctccttttttaagatataagcggacatagccggtatctgctcttgaaggaactatcgcataaataatattatcgttcgctctgattaccttagcttttttatcgttgactgttactttgatataattagtatctgtgccaaagttgtagcctttcaatatcagtttcgtaccgaagccaccactatcaggataaaaaatatcaaatctggattcttcatctgctttaggtggaaaaaaagtctctttatcgacctttagttcatcattacaacaaatggtaaggagcgatagcagcacaacgcatagcggaaatattagcctcgccttacgacttttgatttttaaatttttcatggttcttagatttataaattatgattgagattaatactggttcaactgattgtatctatataataattataagatactacttctaagagttggtggagatttactgtgctttttcatattctaaatattattttgagcgaaataaattagttggccttaatttgataattaaattggggttaattaatcggataaatttattaatcgctgatattatcatgtatttatttcacttttcattgtatgttaattggttatatgacagatgattaattatagcccccattttttattagctttattatccgctttatattcaataaagccaccattgactatttctgcccagtcaatccatgttttattgctttttacatcgtttattttcataccattgatataagatttggaaaaatctcctccttttattttcagctttcctttaggaaagtgtaaagtgatgttattaaaatatggcagactaacgttaaatccggctattccgggaatcataggatacaacccgatggaagcaaatacataccatgatcccattgaaccgcaatcatcatttcccggcataccatctgctttggaagtgtacatctcatttaatatccggtgtactgtttccgatgttttataagggcggtctgtccagttatatatccagggaacctggaagtcaggttcattacctgcagcaaagtaatgatcatcgtagccggcattcagacgtacaaacagactgtccagtcgattagatgcagcttttttacctccgatggtatcaatcagtgtttccaggttatggggcaccatccaaaaatagttttctttggttgcttcgcgccagtcatgatcgggatgtttccagtttaagtcatgattgtggcgtgaacgtagccatctggtggacggatcatataaattcttccaatttaatgagcgtttcataaagaaagaagcctcctttttatttttcatggcttgaagagcaaactgccctatagcatagtctgaggatacatattcaagacataaggaggcgttttctatccccttttctatataattagatagtccgggacgtacttctacattctgtgagtaagtccctggagtacaggcgccacgtttcatgtgcttataagccgtttgaatatcgaagttctgtgcgccaaatgcatacgtattggcaatgatgataggcatcgggtcaccatgcattacgccggtttctatattagcggcgatccatcgtccatagcctccggcttgctcggcaaaatctatggcagattgcatcatgtcggaggcttcttgaggatagaacatggccaacagctgacattgggtacgatacgtatcccatccgctgaaagtagtatagtattctcttccgaatgtcaccttatgaacagcaaaatcggctcctatatattctccatttatatcattgaatatattgggatggatgagtgtatgataccagtgagtgtagaattgggttagcttatcaggattatccgaatgaacttctatttttcccagttgcttgttccactcgtgtcgtgtatccgaaagtacttgttggtaattacggttctcgttatccatccgcagattttctttggcattctcaaccgaaacgtacgatatggcgattttatattcaaccgaagcactctgttccgtatcaaaggtaaaatatccaccggactgggctcctccgatttgttttctgtcttctctgatgctatttcctttccaggttccatattcttttgccttgtgattaaactcagcggcaaaaaatatccggtaatcagttttataaccgcagaaatctccgccttccgcatatccttcacaggaagaaggtgaagttattttgatataggcgttagaaagggttgtggaactgactcctgccccaatcaatacggtaccttcttttttatcagcaggaaatatgaaccgggctattccgctgcgttttgaaacagtaacgtcgcagataatatcatctttcatttgtagagataaacatccggctgttgcttctcttatttctttataggtcggaaaatcttccatatttttaggagactttgtcactttcccactgataggcagtaccggaaaattgcccatatgcggacatccggaaccggacatctgattgactacgatgcctttttgcggtgaaaagaaagaaggtgtgaattgcatcattccaaacggatagctggcaccaatataggtaaatccgcagcttaatccatttcctttgcttcctatgcgtgtatcaaccatttgagcatagttcgtttggggggcttgcccggcattttgagcaatgtttgtacttgggataaataaaatgaaggataaactaatcatccattttatacgattgttggtcttcatgaggtattttatcttttaagattaattgcatgcaaattaaataaagcattattaattgcagaattaaaatcgggttaattaaccggaccttttttttaatcctactatttatttctggtggcaaaacgatggcattatgattttaagcagtatctttaccaccgtgaacgtaagtcttaatagtatgattgatagtgcaaaatataaatatctaattatcgaattgatagctatactaattgcaacacctcatttaagcgctcaaggtctgcagttttttggaaataaagtaccgattgaacaacggacttcctatactattttctcgaaaaagcaaactccggttttctctaattttatcgatatagagtttgaattaagaatatctcagagtgaaactttcgggtatctgtttcatatgctcaatccgataagtgatgaggcatacagtctgacatatacctatgtaagtgaaaagaatagtgtttttaaatttaataccgaaggaaaggttaatcatatttcagtcactgtgcctaatgactctgttatctcacaatggttgcctgtaaaattaagaattgatcttctgaagggtgaaagtctgttgatgattgccggcaagagagaatatggagcaaattctgttgctccgtccaatcaaacgtctcctgtacttattttcggacgtagggaacatctggtggatttgccggcatttgctatccgtaatctgaaagtatccggtgaaaggcagaactattcttttgatttgaatgagagccaaggacatgaggtgcacagtagtgacggtaaaatactgggatgggtagagaatccttattggttaataggagattcttatcattggaggaaagatatttctttcattgtttctcaatgtgtgggatcaaagtttaactgtaaagagcaggaaatacaatttatcagtcccgattcgttatttacctatcagactgcaaaaaagcgaatgctgcgaagaccatatgcgagtaggatgccggtaaaaatgctcttgggaactaattttattaatgaatcggccaatcaaatgtatgcttatgagataaacaacctgcctgttgacagtatcaccatatcgtctctggatttgtccacgctgcaatgggagtctataggaagagcatactctaaagtccagttacatcatcataatggtttttgggacaataagaatcatcgttatatagtatttggaggattcggaaatagattatatagtaataagtttttggtctacaatgaaggagtagaccggtgggatactttgcaatttaaaggagacaatataactccccgctttttctcttcaatgacctcttctgcacaaggcaactatttgtatatatatggcggggtaggcaatgaatccggcgaccagagcattgggcataattattataatgatttgtatggtattgatttggaacgtcgtatcataaaacgatactggagccatcctgtggaagagaagcgtgtaccttccgagcagatgattttatccgaagacggaaagtatctttatgtgattcgctatgcagagtacataaaaacgtccagtttgcagttgtacagaatatccatagaggatggtaatatggaagcattgggagattctattccgtttgtttccggatcgattatttctaccgtatctttatattataatccgacattaaaagagtactattgtgtagcgcaagaatgcaatgagcaggctaaacaggtaagagctaccatttatactttatctgcacctcctgtgagtaaggcagagatggaatattatgtttcgggtgagaaaagcattggatggtcaaaattgatattgctatttgcagttctgtgtatagcggcattgagtatttggatgtttggctttcgtaagaggaggaagactcaaaaggaagttgttcaaagtcgtcctgtcacattttcgtccggtggtcattctgcaacggccccgatgaactcgctactcacttcggaaacgaagattcgtacgaatgataaaaaagaagccaaccggatctatatatatggtatgtttactgtttataaccgggacgggcgtgatgtaactcatttattcagtaagaagctgaagtatatctttttatatattctgttgaatagcattaaagaaggggaaggggtaagttcatcttctttgaatgagatattctggccggacaaggaagaagataaagccaaaaatctgaagggagttactatcagtaatttgcgtaagacactattggaactcgatggtattagattggtctatgacaaaggtgtttttaaaatagaaatagaagatgctatctgtttttgcgattatttcaatttgcatatacatttagctacgcatccccagtcgtgtgaatacttcctgccaatatgggaaagaggaaagttgctggagaatatcgagcattcattgttcgataagtataagcaacgttcggaagacactattctttcattgcttcctaaggatttgccggtttattatcagcataatgaatatcgttatgtgttgcgcatctgtttcattattctgaatagagatccgttgaatgagaaagcattgatgtatagtgtcagatgctataaaaagatgaatgactttgagaatctttccaaaatatactcggctttcattattgaatatcgtaaaagtatgggagaggactatacccaaacgatagaagatttgcttttggaagagagttaatcaatcatttgtttttatatcagcatgatacttcttttttaaaccatacaccaaatacaggatcagccagaatgatttcttttccgtctgtttctattagttctttttgtagtaatgcactcttcagccgaacgatattggcagaggttccgaggttatattttagaatgatctccttactgctaaatttagagtgtatcccatcgatgaccgcttttaggaaattcatctgataagcggagagattttcagtttcgctttgaaaaagaatattgttttggtctagtaaatcttccagagcatgagtcagctgttcctctgttgctatatcggtggtgcgtatccaaagcaaccaggcaagttgttgtacgtaggaagagtgattgtccacaaggcgacagatttctttggcaagctcgggtgaaatgtgcttcccggtattttcaaagcgtttgcagatatattctatccaatatttagtctctattttggtgagatagatcgcatctccgaatttgtagaatggaagattctttttttcgaaaagttcattcatcagatgtttcttacttccaaaaaggcaatatgagacatgctgctgtagttgccacaccgtacgtagctttttctgaaatgtttttgaatcctcaaaatctgagatttgttggaactcgtcaatgcagatcactatttgaatccctttttctatcgcaatcttttcaggtaattgcaagatatcatttccggcattatcctgcatgctatactcaaaagagatagaaaagtcgttcatagggtctgtgccaatggaaattttgggattgatatgtgcgagaaattgtttggtgttctcaacccactcgtcccatttggaagaagtttgttttaatacagaagtagcaaaaagacgatagaattcgctttcggtacgacaggagaaaatgtctaaatagactatctttctggtctttgtttgagctagctgggctactttcttcacaagcgatgttttcccccatcttcttggggatataagtattgtgttcacaccatgtgtgaaattaaggagcagacgctgggtttctttctctcgatcggtgaagttatctccggaagtggctacaccaaaaacaaatggcttttccatgcttatctttttgttggaaccttgcaaatatagcgattctttaataaactaacaagtttgttactaacaaagttgttagtaacaaacttgttagtcattgacgatgcaacctttgtttatatgccagtgttccaattatttaatttgtaattaacgctcgaagggcttgaggacttaacaaaggcttttttatgtaactttgtagtcgtaataacaacaataaaactcaaattaaaatctggaatctgtcggatcgcattgataacttgaattcaacatgccacacagtgatttgatagtagttttgctctcatgctctaatgaaaggtctgtattcctttattcatcgtagtttcaggtatggtagcaagtgtggtggcaggtatgagagcaagcgtttgctctcactcttccatatatcattgtttgtcatttgtttgatattatcttttgatttacaggatgttaataactgaagtgtcaactattaatgattggtatatcagacattaataaatgagaaatcagcctttaatggttgataactcagttgtttttgactgataaatgatttattgtttcttggaagagcaggttaatcgaacagttgttacggtcaagttaattgaatcatataagtaagccatcagtttcctgccttggatactgcagtgtcccgccttgggaactgcagtatcttgccttgggaactatcgtttcccgccttgggaactatcgtttccttcctggatactgtcgtttctgcttcggaaatcatttctccgataataggaggttatcttccatttccgatataagcggcgccttccctgtttataccggtgttgcagatggtggtatctgtcacttatctgcaacaggtatctgcaacgctgtaatcaaatgttgattaaatagttatttcgattttgttgcagatggcagatgtttttcatttataacttctgtgtagtatcgtggaaaaatagcttttcaacttctggagtttcgcttttttacgcttgttctatccatccatactcttaaaacttgcaaattccttccaatcgtttcacagaaccttccaagcctgtttttttgttccggtagtatgattttatttagttattaacttctatatttgttcacagaaacgaacaattatgaaaaacgggatctatacatgcgttattctcatggcatttcttgctttatcagaaagtgtgtatgcagcgattccggttctcacggttgcgagtgacactatcaggcgggtggtgatatatttcgataaggaagaaacagatattgattttagttataaaactaataatcatgaaattaatgttttagattctttgcttgaagaaaaaataaattcaagatatatcactgcgctcaatgtggtcacttttgtatcgcctgacggagattcggtttacaatgccgcattatctgtccgaagaaacaattcgatgagagagttcttaaggcaacgttatccgtatgttgatgtcgaaaagattaaacttacttcggaaggagaagattggtctgaacttcgtaagttggtggcgtcggattcagacttgccggaccgggaagaagtcttgatgttgatagattatcatcgggataacactgtgaagcgaaaagaactgttgcagaagttgaatcagggaatggcttaccgatacattgtccgcaatgtgttacctgagttgagacgcgctgagattacggttgtccgggaggttccggaaatggaaaagaatacttttgaaccggtatcttctgtcttcggattgtttgtttcaaagcaggaagaggcgcttccgagcgatcaacctgataagccggagggagaaagtaaagagagtatggcttatgaggatgaggtggtagtgtcggaggcagaagggccggttgaaagtaaaacggtgcttgcagtgaagaataatctgttgtacgatttggcgttggcgccaaatctggaagtagagattccggtaggcaaaaggtggtctttaaatgctgaatacaaatgcccgtggtggctgaacagtaaacatgatttctgttatcagcttctttcgggaggagtggaaggacgttgctggttgggcaatcgtcagaagcgcaaccggttgacagggcattttattgggctttatgctgaaggtggaatttacgatttccagtggaagggagacggttatcggggcgattattacggagctgcgggagtgacctacgggtatgcgcggcaactggctcgccatctgtcgctcgaatttagcttcggcatcgggtatctgacaacagaatataagaaatatactccttacgagggggatatcgtgtggacaactagtggacgttataactttataggtcctaccaaggcgaaagtctctctggtatggctgataaaaagagggagataaggacgttatgcaagatacaagatacatacttcttgtgcttctgtcctcgctgctgatgctgaccggatgtagccgtcgcgaactattggatgattatcccgtaagcggggtagatataaagttagattggaacggtgttaccgataagttgccggaaggggttcgggtgattttttatccgaagagtgcggaaggcagaaagattgatacatacctttcagtaagaggtggaaaagtaaaggtgccgccggggcgttactcggtagtggcttacaactacgacactgaaacggtgcagatcagaggagaggaagcctatgagacgattgaagcatttacaggctattgcaatggtctgggaatagcgggaacggaaaaaatggtatggggacctgatcccttatacgtagtgcagatcaatgatttacatatagcgaacagtgaagaagagcttctactggattggaaaccgaaattagtggtaaagacctattctttcaagatcaaggtggaagggctggaatatgtttcttcaattgtaggcagtgtggaaggtatggcgggttgttactgtttgggcagatgttgcgggatgatgaacgatgctcctatctactttgaagcgcaagggtgttcgggcgaagtaacgggtagttttactgcttttgggttaccggaaggggcgatgagtcgggcaagtcttgctataaagtttacgctggcatttgtgaaggtggataatacggtacagaagatagaggttgatataacggatgtgattgttaattcggagagtggtgaagggggaggcaacgatgagccttctaaagatatagagttaccgcttgatgatgatgaggtgaaggttgataagccggaaaattcgtctggtggtgatggtggtattggcggtgatgttggtgattggggggaagaggaggaggtgcctttgcccgtaatttgagataaagcataagcaaaatataacaatattataaacttaaaaaaatacgattatgaaaaaggtattattggcgattgcagcagttgcaacaattacaagctgctcacagaatgaagaatttgagaatccagcacagaatgcggagataaattttagtactattgtaagtaaatctacaagagccgttataatagagaataaggactttaagaaatttacagcctatgggtattctcatggtgaaacgaattttacgggagttgttacatctactataatgtctagtgctgaatatactaaaggtgaagatggaggctggactacatcagggcgttattattggccgacatctggtaaggttactttctttggatatggaggagtggctactgcaacgtatgctaaagaagacggtaagtttcctactttaaaatatactgtgttaacggatgttaataagcaagaagacttactagtagcacagcaagctaataaaagtaaagaaaacaataatccttctgttaatttgaattttaagcatgcattggctcaagtttactttaaattgaaaggtaatgacgcagaccttacatatacagtttctaagattgaactaaataaggtaagaacagaaggtactttcacatatgggggtgatcctgatacatctattggacagtgggctgtagaggataacgcttctactggaaattatgcaatcacattaaatgatcagaaagttataggagaagcagaagccacaattttaaatgatgccttaacacaggtaatgattcttatgccccaatccttagccggagtagaagttaaagtaacatatagtgcagaaaagggtggccttgaagttcatagtgcgagtgaacctgttacggtaaaattgacagggaactgggaagctggttctaaaacagcttatgtattatctttaaatggtgatgctataaatttgacagggtcttctgatgacacttcatggtcagaaaaaacagatgtaaatactgatgtaaataaataatttggacgtatttattaagaaacaaatgtctgttttgattatttgaaaataaaatattccggggactttatctgatgatatttcagatagtcccctaattttaaattaattctagttatgtttgaaagtcaaaatctagtgtaaaatttatatttaggaatttttgataatataaaatagtgaatagcttttttaaaagtaaaaatactctcctttttatattacaaaaaaaatgtaaaaataacctctttttcacttttcctcccttttctattgccatgtaaaagatttcatatatttttgttgcaaacaggaacaaatcaaacgccaacacaaatatatgtcatcaatctgtcagggtacttgggattgtcagaactgtccgaaagccgtagacaatgctatcattcacactacccatacaaggggctaccatcaaccagcccggaagtgtgaagataatttcatcctttttttgataaagggagagctcttggttaatagtcaggagtatgcaggtacgatgttgaaagcaggtgaatttattcttcaggctattggttcaaaatacgagatgcttgcgatgaccgagtgcgaatgtatctattatcgttttattcagccggaactattctgtgacttccgtttcaatcatatcatgaaggatgtaccttctccgcttatctattctcctttaaagataattcctgaattgaaatactttttggatggttccaaatcctatttgagtgaaagtaaagtctgccgggatctgctgtctttaaagcgcaaagaactggcgtttgtgctaagctactattattcggattatgacttggctagtttggtgcatccactctcgaaatacaccaccacttttgaatacttcatccttcagaactataagaaagtaaaaacggtagaagaactggctcaactgggaggttataccgtcagcaccttgcggcgtatcttcaataatgtattccacgaaccggtatacgaatggatgcaggcgcgacgtaaggaaggtattttggatgacttgaataactctgagtacagtatctccgaaatatgctataaatacggttttgagtctctgcctcacttctccaatttctgtaagaagttctttggagcttctccacgtatgcttagaacaagcaagaagaacgtctgataatttttcagagagaaagtcaaaaactatttttttctttgtgggtgtagtacatttgttgtatattgctagctgtttcctttaaaaccagtctaatacatctttattataaagtcagatcacttcaaataaagccatgataaggcggatacggaaattaaactttttatttcaacgaattaaaatcaggtttcaaagcagaataataacatgatagattatgctgaatgaatgaaagataataggatatttttctaatactcttttgtgtaatcagaagagagtctgagtttgaaatctattatggcacgtacaataactaggatataaatcataaatactatgtaatgagaacaaaacgagcttttaaggaattttgtgtattgggtggtttggcatcttccgtttgcggagtagctcaggagcgcccgaatattattgttttccttgtagatgacatgggacttatggatacgtcggttccttttatcgcagatgagagtggtcagccggtgcgtcatccgctgaatgactggtatcataccccgaatatggagagactggctaaacagggtatttgtttttctactttttacgcacagagcgtgagttccccttccagagcttccatcatgaccggacagaatgcgaccaggcatggagtcactaactggattaatgctgagagcaacaatcggaatcctttcggaccgccccaatggaactggaaaggtctcagaaaagatatgcctaccatgccgagagtcctgcaacaagccggatataaaaccattcatgtaggaaaagcacatttcggctgtatgggaagcgaaggagagaatccgctgaatatcggctttgatgtaaatatcgcaggttccggcattggacatcccggcagctattatggcgaatggggatacgggcatatcaagggacagaagattagagcagttcctgacctggagaaatatcacggtacagataccttcctgagtgaagcgctgactatagaagcgaatcgggagatcaccaaagccgtagaagaaaaacgacctttctatctgaatatggcccattacgcagttcattcacctttccaggcagacaaacgtttcttgtcacgctacaccgacccggataagaacgagcaggcaagagcttttgctacattgatagaaggcatggataaatcattaggcgacatcatggaccaactcgaaaagctgggaattgccgaaaatacgctgattctctttttaggagataacggtggtgatgctccattgggagatgaacgtggctatggttcttccgctccgctgagaggtaaaaaggggacggagtttgaaggtggtatgcgtgttcctttcatcgcagcttgggcaaagcctgagaagaagagcaaagtacagaagaacttgcctattgaagtaggaagtatgcagacacagttgggcacaatcatggatatctatccgactgttctgtctgtggcaggatgcgaagttccccaaaactacgtgatagacggattcgatctgaaaaagcaactgagcggtaaggtggacaagaagcgtcccgagtctttcctgatgcacttccctcacgcacaccgcggcagctacttcaccacctatcgcatgggcgactggaaactgatttattattatcttcccgagactccgaaacaacccaaagccttgctttataatctgaaagacgatccggaagaaaggaatgagctgtctgccgcacatccggatcaatgcagagagatgattcgggaaatgtccgcccggctagaaaaggaaggagctctttatccggtggataaacaaggaaatgagttgaagccttttgtttacttttaaataggtgctactatttcaactgtctgttttgccaaagcatatctattaggcaaaacagacagaattatatatcatttgtcagatacaattgctatgaccggattggcatcctcatccaattggctcatccaatggggaatattctcatttttattgtcagattgtttttgagaagcatcaggaatactggcagcttccagaataaatccatattctcctttataactgcacaatgccgacaggtcaactttcagttcctgctctgaagtgagatcgtcaacaatgaattgctggcactttgcaaacttagtttgctgtgtttctttattatacaaaccattatagacttgtttgttttttacgtattgaaaaaatacagaatgtgtgttttccaatacataagctacgtagatactttgcggattactataccataaaggattggcggatgaatgatctgtatctgtatgaaaaaccatatatggatatagtttcctgtttttaactgtgtatatcgtgtctgtgaaggtttctctgaaacgtacttcattctcggacgaccataggctgggattatagagaggcagcagtaattctccttgctccttatctttgataatcattacccctcttcttcccagatttccaaagaaacctgctcctctttttatgatagaaaggctggatatattatccggagaagggatagagggcgattttaataaattgggaattgaatccagcttttctccaaaggagttgaggaaaagcaaagagttgctggattccaatcctatactactattacaatgggcaataatggtagagtcggaaaacgcgaaaaagtcgggtgcggcaggtatatgtggaatttgaattttcccggtcatttctcctttctgattatattttagcaactggtccggtgcgcgaaagaagtaaaaaagacctgcatcatctatccagtaatttgtcgagctatatccacttggatcatcaccgatatggcctatactgcatatatacttcccggtctgtttgtggaataagaaacattggtctttagtagcaatcacaatcttgtcttccagcagcgctatatggggattgtttcctatcaggcatacttcgttggtttccaaaggtacataacgtacagtatttccgaagtcagataactttaggctttgggaatcagttgcatccgtaagatttacaaataatgtatccctggcattctcctgatttgtgatgcatgaggttagtaagactactatccatatcagcaataatttattcatcgtatttaatttatttgattgtctggccttatgtcacaaagaaaagaataaaaaacggataatgaacaagctatctataaataattggtcagtaaaaagaaatcccccgccagctaacgccgacgggggatttatgctattaatcaaatcaagctcacgcttagtctttcagtttagcgatgatgaagtcgcggttcaggcgggcgatgttgctgatagagatgttcttcggacattcagcctcgcaagcgcgggtgttggtacagttaccgaatccgagttcgtccatcttggacaacatagctttcgcacggcgcagagcttccggtttaccttgcggaagcaagttcaactggctgacctttgccgaaacgaacaacatggcagaaccattcttacaagcagctacacaagcaccgcaaccgatacaagaagcggcatccatagcttcgtcagcaatgggcttcgggatcaggatagcgttggcatcctgcggagcgcctgtacgaacgcttacataaccaccggcctgcatgatcttgtcataagcagtacggtctaccatcaagtccttgatgacagggaaaccggccgaacgccaaggctcaacagtgatggtgtcaccatcgttgaaacgacgcatgtaaatctggcaagtagtagcacctgttgcaggaccgtgcggatgtccgttgatgtaaagagaacacataccgcagataccttcgcggcagtcgtggtcgaatacaaccggttcttttctttcgctgatcagctgttcgttcagaatatccagcatttcgaggaaggaagtatcaccggggatatctttcatttggtaggtttcaaaagcgcctttagccttcgggcctgcttgacgccataccttcagtgtaaatgatatatttttatccattttcgtctaattcttttaaatgtttaacttcaccgattagctcttgtagttacgggtctgaaccttgatagcttcgtataccagcggttctttgatcaatacaggagccttttcatcgtcaccctgatattcccagcaagctacgtagaagaagttttcgtcatcacgttttgcttctccttcttcagtctggtattcttcacggaagtgaccaccacaactttcgttacggttcaatgcgtcgtaagcaacgagctcgcccatagtgatgaagtcatacagacggatagccttgtcgagctcaacgttcataccttccttagaaccggggataaacagattggtttcgaattccttgcggactgctttcagttcggcgatacctttcttcaggccttctgccgtacgtcccatacctacgtattcccacatgatgtgacccagtttcttgtggatagaatcaactgattctttaccctggatgctcatgaacttgtcgatcttagcctgaactgccttttctgcttcggcaaattccggaaggtcagtagagaaacgaggaacagtaatctgatctgccagatagttctggatagtgtaaggcaatacgaagtaaccgtcggccagaccttgcatcaatgcggaagcaccgaggcggtttgcaccgtggtcggagaagttacattcaccgatagcgaacagacccttgatggtagtctgcagttcgtagtctacccagataccacccattgtgtagtggatagccggataaatcatcatcggattataatatttcacaccactgatttcttttgccagttcgcccggattaacgtcagtgatttcttcatacatatcgaagaggttaccataacgctgaagcactacatcgatgcccaggcggttgatagcttcagagaaatcgaggaatacggccagacctgtgttgttcacaccgaaacctgcgtcgcaacgttctttagctgcacggctggcaacgtcacgcggaaccaggttaccgaatgccggataacggcgttccaggtagtagtcgcggtcttcttcaggaatatcgcttcccttgatttcgcctttctgcaatttgatagcgtcttctttcttcttcggaacccagatacgaccgtcgttacgcagagattcggacatcagagtcagtttggactgcttgtcaccgtgtaccgggatacaagtcgggtgaatctgaacgtatgcggggttagcgaatacagcacccttgcggtagcaagagatagcagctgtacagttacaacccatagcgttggtagacaggaagtaagcgttaccgtaaccaccggtagcgattactacggcgtgagcagcgaaacgttccagttcgccggtgattaagttcttggcaatgataccgcgagcacgtccgtcgatgattacaacgtcctgcatttcataacgggtgaacaacttcaccgtacctacgtttacctgacggcttagtgcggagtaagcacccagcaacagctgctgaccggtctggcctttagcgtagaacgtacgtgatacctgtgcaccaccgaaagaacggttgtccagtgtaccgccgtattcgcgtgcgaaaggaacaccctgggctacgcattggtcgatgatagcgttggacacttcggccagacggtaaacgttggcttcacgtgcacgatagtcaccaccttttactgtatcgtaaaacagacggtaaacggagtcaccatcattctgataattctttgcagcattgataccaccctgtgcagcgatagagtgtgcacggcgcggagagtcctgaatacagaagttgaatactctgaaacccatttcaccgagggatgcagcagcagaagcacctgccagacccgtacccacaacgatgatatccaaacggcgtttattagcggggttcaccaatttctggtgagctttatagttggtccatttctcagccaccgggccttctggaatttttgaatctatcttgatcataatattatttacaatttaatcatttacaatttactatttagcaagcaccgccacaaaggagtgatttcacgaagaataccactactacgagtgcgaaaccgagtactacaatcgtagaatagatgttagaaatacatttccaacgattgatccataccttgttgttccatcccagtgattgcatggagctccagaaaccgtgagtcaggtggaaccacaaagcaaacagccaaatgaggtagagcactacataaaccggacaagagaatgtctgctggatgtgatatgcaccgtttgccgcataagccagcgtcagtgtatcagcgtgcatgtccaggttgtgcatcagttccggcaactgcatttttgcccagaagttgaagaggtgcaaaccgaggcctacgataacgataatgcctaacaccaacatgttttgagaagcccactctacagttttcggtttgtcgactactgcatagcgttcgctaccgcgcgctgtgcgattctgcattgtcagccagaacgcgtagatgatgtgaataatgaaaagagcagccagtgctgcggtagctaccagcgcataccagtttgctcccaaaaactcacaaatcatgttgtaaccatcagccgagatgattgcaactaagttcatcgccatgtgaaatgttagaaacaggacaagggcgataccggtaacgctcatcaccactttccttcctacagatgaattacttaaccacataaatgattgaatttaaattatttaattgttagaactaaaatttcgacgttttacacctcttacagactgcaaaaataggggaaatagattgattgaccaaagaattaaagaaataattccttaatcggtgatctttccgattttttcgccattggccgctttcttgcgcaaggcgcgcggggtgtctccgaaggagtctttgcagaagtgtgcaaggtgggacagcgagtcgaaaccataccggttgcaaatctctgtaatccgcatattagagtgctgtaggtcttcgaggatgccttcccgttttttctccagcatccattcgtagacgggcacgccgtataagtttcggaagagacggcggaaggtggtggtgttatagcctcccagatgtgcgaattcttcgacgttcttcgctttgctgtaattctgcatgacaaagtattggaaactttccgtataggtgctgatcgggtagaagaaagccctcaactggggcaggggatagtaattggtgatcatatacaccatctcctgacatttcaggtcgatatatttgccgcaggcgggtgtcgattcgtcaaggtatgcggctacgtcgttgatgagatagaacaggcgcgggttcatcaccattggggtgtaggtcagcgggccttctgcctggtcgatgatttcacggtagcggttttcgcatagcaacggcagttcgttgaaccagaaaaggatgtatgatacgtccgtcagtgccagtatctcgtattttgagccgatggcttgcaggataaactgtttctcgtgtagtgtcgttccgggatgttcgtcactgttgatcagcaattcgccctcgatcataaagagcatgcagttttgcgtgcacttatccttcggaatatgctgccctctgagcagatttctgtgaataagagtactttccatcgctttggggcatcctgagcaatctgtatgttgagcacaaagtgagtcttttgacatgggttttatccgtgaatcgttgtctacagggacaaagatagtcgttttttgtgaaaataaaattctttcttccattatgttttagcagaaacggggatatgattgtctttattggttttgtttgcacaactttgaagtttcacggactcctgaatggcgttctttaatacattaatacatttttatctgccatctgcagcattttcttcatccctttacatgatatattcagaacaagtagtttcatcattagttccacctgttgaaaccaagtgtttcaaggcatgaaacaaactgtttcaagtaatgaaacttcttggaacaactgtcgatttcgttcatatgacagctcgattcaactcacttgaccgcataagttgctctgattgacctgtccgttcgaaaggtattatttcatttttcagtcaataatggatgacttctcagctgttaatacctgatttctcaattattaatagctgacatgacaatcgttaatagctgacgcgtcagatgttaatacccagtaaatcaaagtataatgtaggataaacgacctatatgccgtggtggcagagtgagagcaaacctttgctctcactctgccaccatacttgctgtaatgcttgaaatgccgatgaataaagggatacacgcgaataatgagagcgttagggcaaaactgctatctttttcacttgtagcagctgcctaagttcaagttataaatgcgacagttcagtttccgtaccagtcacttacttattatagtatttttcaagcagttcctgcatttccggatatttcccgtccgtatctccggtttctttgcgaagtctcaataagtccttcttcatctgtttgatgacaggtgcatatttcggatcgttgtatgcattatgattctcgtgcggatcgttctgcaagtcatagaagtcccatgacggagtaaagtcgaagttctccgtatcagtcatgtccagatttcgggcataatagaagatcagcttgtaacggtctgaccggatggcgaagtgtgcgggacgaatagcgtgattggtccagtagcgatagtagatttcttttcgccagtcggtcggcgtgttgccttccaggttgctgacgaagctgtctccttgcacattctccatctttactccggcaaattctgccagcgtcggtgcgaaatcgacattcagtatcagatcatccagacgttttcctgcggggaccttattcggataacggataacgaaaggcatacgagccgattcttcataaaacatccgtttgtcgaagaagccgtgttcgcctaggaaatagccttggtcggagacgtagatgacgatggtattgtcggcgatattcatttcgtccagagctttcaggagtttgccgatgttgtcgtcgacggtagcgccacaacggaggtagtcacggataaacttttggtaggaagcacgtctggcggctgtccgttgcatcccttcggtgctgaacggcagtccggggtagcggcaccaccacttgtcgggatcctgtgatgcgatgcgccagcggcgttccagttcttccagtgtctgtcctttgaaagaacggccgttggtttccggtccccagtccagcaggttttcgggttcggggaaggtgacgccgtcgtagagatgctccatgcgtatcgggtagtcgtagggttcgtgcgttgctttgaaatggcagcacatcaggaagggctggttgccgtcctgctctttcatccatcggatggctttctcggtgacgaggtcggtggagaagccgagcacccgttcgccgaaccggcggttgccgggccacgggtcggtgctctctatgaaagtcgggtcacggtattcgccttgatcgtagaagatggagtagtagtcgaatccttgcggttgcgactggatatgccatttgccgacgagtccggtgtggtatccgttggcttgtagcagggtggcaagggtggggatggaggtgtccagtgagtccgcaagggtgtacagtctgttccggtgactgtatagaccggtgaggatactggcacggctgggtgctgagatagagttggtgcagaaacagttgtcgagcactaccccttcttttgccagccggcggatgttggcgttgtgggcatattctgccagtactccgccatagatgccccaggcttgggaggtgtggtcgtcactcaggataaaaaggatgttggggcgttgtccggcaggttgagcgccttgcaggtgcgtcatggttccggctgccagcagaccggtaagtacgagtttattcatatacgtatagatgttgcatttcttcaaaagtcagtctaagttagacggttgctttcatgtagataaatgatcatatgaactgattttatgcctaaagatagtgattgttattcactttgtattataatccggaaaacttttgcgatttaatgtaattgattccggtaaaacacttaattccctttttaaaaggatgtttttgttttacatctctcaataagaaactttatgttgatttttggaagtattatagtgatttttgaacatttgttttctttgcctgtacctacttttgcgatcaaaacccattaattatcaattattatgctactaccaagaaaaattgtatttttccttctcttgtttgtcggattatcgttgtatgcgcaacaaaactgcttcattagttcgtatgtacggggtaatttctacaatcgcggacgtatttctgccgagagtttaagggcgagtgatgatctgatttttctgaacgtccgtcccaataaagatgggtcgctttcgtttgagaatccccgtatctttgagaatgggaaaggagtgactagttgggaggaattgataaagtctgtccgtgcggatgtgaaaggaacaaagacaaaacttcgtctgggcgctgccagtggcgagtggaaagcgatggttgcagatgaggcggcccgtgttgcatttgccaaaaacataaagaagatactggaaaagaataagctcgatggcatcgatctggattttgaatgggcggagactgaaaaagagtatgaagattacagtctggctattctgaagatgagagaggtattgggagataaatatgtgttcagcgtatccctgcatcctgtgtgttataagattagtaaagaggcgattgctgcggtcgatttcatttcttatcagtgttacggtccttcgccggttcgcttcccgatggagaaatactgttcggatatacagatggcgttggcttatggcattccaaaggaaaagctggtggcaggcgttcctttctatggcgtgacaaaagatggctcaaagaagactgaggcttacttcagttttgtgcaggacgggctgattacggggccggcacaaaacgaagtaacctataaaggagacgtgtatgtctttgacgggcaaaataatatccgtgccaagacacgttatgcgatggaccagcagctcaaaggaatgatgagctgggacttggctacggatatgccgctgaatgacagcagatcgttgtttaagacgatggtggaggagttggggaggtgaactgcttcagataatctgaaggagagacaccaaactcatccttaaaacattgacggaagtagcctgtactgttcattcctattttataggctatttccgagatattatattttccttcgaggagtaaccgttccgcattctgcatttttactttccggatgtactcgttcgtagaaagtccggtcagtgctttcattttccggtagagcgtagaaccgctcatacacatcttgtcggacagataagtgatgtcgatcttctccgaagaaaggttatcctcaaccagttgcgtgattttctcaatgaattcgttatccagtttgctgagcgcctcggtgattatggaacgcttttcatccaaatgagaattggggttatgattcgttccggcctgctggaattgagcaatcagtttctttctcgaatcaagcagattgttgatgcggcttcgcagcagtgaagcactgaaaggcttggtcagataagaatccgctcccacttcgtatccttcttctttatcctgcaatgaatctttggccgttagcaggatgacagggatgtggctggtacgcacatcctcttttagttgacggcatagcgtgatgccatccattaccggcatcatgatatcgcttactataatatcgggaatacggttgagagcctgctgtttcccttcctcaccgttgctgcctgtgattacttcgaaagagtcggagaaagattcggcgatgtatttctgtatatcttcattgtcttctacaatcagcaggataggtttgctcgtttccggttccgtattttgagaatcttccggaacagcttctgatatcatttcctcctctgtttgcttcgtagagtctccatgcaaagcgttggggtagatattgtctgttaataagctgatatagaaagtacttccttcgttctgtatgctttccacccggatttcgccttcgtgcagttctacaagatttcggactaaagccagtccgatacctgtgccggatgcctgatgcttgccgctttcctgatagtaacggtcgaaaacatgaggcaaggcttccgcagagattccgtatcccgtatcactgactttaatctccgtataagtgactccgtttcgtgtggtgggatacaagctcaaggttatttttccctgttccgtatatttgatggcattggaaatcagattatcgaggataatggtgatgatttctttgtcaaagaacagaagcatctcttctttttctatttgaatctgaaagtcgatcgctttcttttgattgagttctttgtatttgagtccgatttcatgaacgaggggcgcgatgttgcttttgcaaacacatagctttttgttctgcgtttccgttttccggaactcaagaatctgattgatcaggttgagcagccggagggcactctggtggatgacagaaagtttctgcgcctgtctggtcggcagtgacgtgtctttctgcatatcttccagcggaccgaggatcagggtcagtggtgtgcgcagctcatgagtgatgttagtatagaatcgcaaacgttcctgattcaattcttgttcttgttcgtggtttttcttttccagggtatagagactttcgaggtctattttcttcttataggcatggataatagtataaataatgctgatagtgatcagaatataaataagttttgcccaccatgtcagccagagaggagggttaatatgtatcctgagagatgtcgtgtcctccgaccagtcctgattgtgcaggcgggcttttaccagaaactcatacttgccgggaggaatattgcggaaggtgacgctgttttgctcgttgatcgtataccatgagttttcaagtcctttcagcatataggcatattccacttggttggccagtgaatagtcctgtacgttgaaagtaagattaaaactattttgttcatgagtcaattctatctctccttcggagatgggaatagcggtttcgttcttctcccgacttgtgagtcgtccgggaattctcactttagtgataaccacaggaggaatctgcggactgtttatggcaatatcggggttgaagaaacacaatccgttgatagagccgaaatagatgagcccgttatgatctttggtaacgcatccgctgatgaaacttccttgtgggatgttgttggagtgatcgtaggtatagaaacattttttagaggtgatatagcaactgatgccggtattggtacttgcccagatgttgccgttcttatcttcactgatagctcttatgtgtgtattgggcagtccttcttttctttgaaaaacctgatagtcaaaattacgggccgaaggaaaacataccagcccctcaccggtggcaagccacatctgacctttgctgctccggtatatctgattaatcgtattggaacaaaaaccttcgtattggttgaacttcctgaccagttgcatatccggcgtatatatcccgactcctcctccgaaagttcctatccagaaacgtccttcactgtcttgggcaatgctgcgtacaaagttttccagcaactggctgttggaggtgtcataatgatgaatcaccttcttgctggcaaggtctacaacgaacacccctgcgtgagttcctatccatatctttttattcttgtcttcatagaagacgcgtacgtcgagaagctgattcttttccagttcgatgatctgaaacttcttcagtcttgtattgtaatagctgatgttgcccagataggtgccgaaccataggttgccttccgagtctttcagcgaacaaagcactgagttggacaggagttctctgttttctttattgtaaatggccacccgttttccgttttcgaatacgttaatacctcctccgtcagttcctatccacaattttccttgtccgtcatcgcagacgctgctaacgactttgttgctcagcgaactttcattcatttgggtgggtgaatagctccatgtatggaatgcgggaggagcattgctgataaaattgattcctcctccccaagtccctatccagatattattaaaagagtcttgaaagatataccgtgcgctggcgttggacaaactgtagttattgtccccttcgcggataaactcaaagcgtatttgttcgggcagcagaaactgattttgctgtaagtccagtatcatgattccgttcagttctgttgcaatccagagtttgttgtctttgagttgtttgatggagaagatatagcttgacaatgctccgtgaatattccccgggttgttatgaaagttggtaaatgtttctgtattggcattgaacagggctagtcctttgctggttccgatccatatatttccgttggtatctttatagatacaacgcacatcgttccccggaaggctgttcgggttttgaggatcatggacgaagtgcttcacggatttgtcattcagggagaggatgctcaacccgccttctacgtgtccgatgtatagtttgccatcctcagcctccgtggctgtccaggtctgctcagagggaagggcgggtactgtgcttttgttataatgagtgaatttcccggtagcgatgtccagatactctatacctctgtaataagtacatacccataaccctttgccggcttgtacggatgaggtaatgtgagtgacatcgttcgttatcagactttgcgggtcttccggattatattggtagacgctgaaactttgtgtctcgtaattataagcgttgagtcctgcccgctgggtggctatccagataacaggctgcacgggatcggcgtacacttcattgagttcgttgccggtaatgctttgaacagaagaagattgctcctctttatagtaggtgataaagcgggttccgtcaaacttattcagcccttcttcggtggcgaaccacagaaatccctgcttgtcctgcgtgatactcaatacataattgttggataagccttgttctattcccaatctttggatgaggtaagggtgggctgccacaaatgtggcggatagcaggaggaagaaagccgcaatgtatgttttcatcgtttcagatattatgtattccttgatattcactctcaaaagtacaaataaatcttgtatttagtatagacaaatgattcattgcatgattttctaccctttctgcatgatttttacagcgaataaaataaaacaactgtaattttgcaatcaatcaaataaccgaatctaatacttgcagaaaatggaatctgattctttacacgaacatgataaaagctggaaggcattttttattaccactctgttcatcttgtgtacagcgaacgtttatgcgcagtcatccgatacaatcttttcccgatatttccgttatgcgcagaacttcgcagatgcgtaccctcgcgagaaagtgagtcttcatttggataatgcaagttattaccttggtgatacgatttggttcaaagcgtatgtagtgacggctgaacaaaacttaccgacgacgatcagcaaacctttgtatgtagaattactggaccagttgggaaatgtcgtagagcggcaaattattcagcttacggatggggagggaacgggacaaatcattttgaacaataccttctttaccggttattatgaaatgcgtgcctatacaaagtggatgcttgcttttgataacccttcctgtttttcccgtgtattacccgtctatcggaaacggctgagcgatgaagagactcctcggagtatagctacctatcgtatggacgcttcgatgaaacagaggccgaaggataaagagaagaagtttacagtccgcttttttccggagggtggacaactggttaaaggcatatcttcgattgtagcttttgaagccaccagccgtgacaaaggagctgctgatgtagagggaacagtggttttgccgagtggtgaagaactggcgcatatccgttcattgcatgacgggatgggttactttgagtataagcccgaagaaaaggcgggtgtggcaaaaattgattatgaaggctccacttatcagtttgaccttccggaagctcttccacaaggatatgtactccgaatcgataaccggcgggaaatgttggatatcactgtagcccgcagttcacaggcaatgaaagacacactggctgtttttgtatcttctcaggggcgaccttacaaatgtatgacactggactttgaagatgaattgaactgccaattccggatttcgactaaagaactaccgcccggagtgcaacagatatctctggtcaatctgaaaggggaaacgttatgcgagcgtttttgttatgtgatgccgcgttcttccatgctccttgcctgtaaaacggatcacgccctgtatcgtccttttgagccggtgacttgccggattaaagtgagagatcatctgaatcgtccggtacaggccaatctttctgtatctatccgcaacggtgtagagtctgattttcgggaatacgatcattccatttatacggatttgttgcttgtctccgatctgaaaggctatattcatcaacccggtttttattttgagaaccagtctgccgaacgtttcaaaatgttggatgtccttctgttggtacgtggctggcggaagtatgacctttcccgactgataggtaaacgtcctttcttgcctcggtatcttccggagacctcgctgaccctgtatggacaggtcgaatcttatttcggtaaggcgttacggaatgtcggggtgagtattcttgcgcgcagggattcggtctctattgcaggtatgacaaaaacggattcattggggtattttagtgcgccggtagatggttttagcggttctatggatgctctcatacagacacggaacgagggaaagaagtggaacaagcaggcagtcgtgaagttgttccgtaattttgagccttccttacggaagcttgattattatgagctgaatccggaatggaaagagacgggtgatttgaaacagttgttggacaccttggatattgcttataaagattctgtattcggaccggatcatcatttgctggatgaagtggtggtgaacgccaagcgtctgaacttgttattgaagcaaactgaacgctttgaaaaagagattctgggttattataatataacgcaggtggtagataaaatgcgtgataaaggagaagcggtgtacaatctgcctatgctgttgaaggaattaaatcctaatttcagattgagtgattcgctgagcctgcactataataactcaagagttttatttatagtcaacggcggggttttatcttatggtaaaacggattatgtgttggacaaagatgtggatgctattaaatctatcatgctttattatgatcaggcagggggggaatctgtttttgtgatgaacaagcagagtaatagagtgacgaaatttacagcaaataatttttggagtggtcgctggcaggatggagatttgagtgatttgtctttgcaggatgctataggtgcggattccggaccagatgcactttggggtgagaaagatagaaagactatgaagaaaggtccgttgcagaaatcgtcagtagtagtttgctccatcactacgattgatgactgggacccgaacaaaacttataaagcccggcgcgggattcgtcatacctatatacaaggatataatgagcccttggaattttattcaccagcttatcctgatggtgctcctctctatacggaagattctcgccgcacactatactggaatccgaatgtgaaaacgaataaaaagggtgaagtagtcattcaatgctataactccgataattcggcaccgttaataataaatgtagagacattgtataaaggtagtccgtcatcattgaatatctactctatagattattaaactcgatctatattattcatattcatataaagtcctgttaaagaggaagaaaggagttgtgtttcttgcagccaacgtgtgtaaatcgtttatgaatgattctctacgttttttgaatgatttttataatgtaaaatctacactcattcgtatctttgctgtggataacaacgaaataaactaatattatgaaaatgaaaactaatataatctttaaaaaactaaagtcattcgtcaatcgatgtctttttcctgattatatgtgctgttttatcttcctgcgtttataacgctgatatgccaataaagaatttttagtgaaccaataatttaatatgtaaaaagaaaaacgttatgaaaagactatttcttcccttattagggtttttgtcgttggtgctgatgtgctgtaatgacaacaaggaatcaggtacggattcctatgacccgaacaaacctgtcactattgactattttacgccggacaccggtcgggtagcagagaaagtgattattataggtaataactttggaaatgacaaatctgcggtaaccgtattatttactgataatatggaaaaggagaacaaggctgccgtagtgggagtagataatactacgatttattgtatggcaccacgtcaggcagaaggtttcaataagattacggttaaggtgaatgatcagactgtggtggctgatgagacttttaagtattctgtttctgagaatgtatctactattgccggtgattttgtacaagctgatggtgccggtaaagatggaagtctggctgaggcaacttttgggcagatgtttggtgtagcttgcattgatgaacagtcgggtattgtaggtcaggcatggaataataatagtgtgcgttatatttctatagacgaagatgctgtaattactatccaaagcggtcctgtggttgggaaagtggcggtatctaatgataaaacattggcttatggtgctactattaatggtgctaataccgtttatgtttataagaaatcgcaggcatgggttccttctcgactaagtgatatcagttcaggtaccgatgtttgggctgtggctttgaatggtgataatcaatggttgtattatgtaacggctaatggtcgtttgggacgtattgaagtagataatccgactcataatgagattttgtttgaacataatgattttagtggtggtccttttgcttacattgcttatagtgcttttgaagattgtttctatgtaactactgataaaaataagattctgaaagtttgggtaaaagaagatggtacacatgcttacgagcagattaaccagaataatacaggaactacagacggttttttggctgatgaagcaaaattccagtatttacgtggtcttacaatagatgaagatggtaatattttcgtttgtcagggggataatagtcacgtaatacgtaaaatcgcttatgatgagaatatggagaaaagatatgtaactactgtattgggtacatccactgtacatggaaccgatgatggttcacctgatattgctttatttaatggacctcaagatattagctatgacgggaatggtggttactggattgctatgcgctacgagccggcattaagaaagtattcaatagaataaacacattaatcagaatttaatcatgaaaaaaataataagcatcttatttataatatgcagtctcttttcttctatggcatacgctcagggagggttgacatattccggtactgtcatcggtgaagatggatttgaacttataggcgtgagtgttgctgtaaaaggaacctccattggtgtaattactgatctggatggaaagttccgtttaaacaatattcctcccaagtctaccattgttttctcttatgtaggttttgagaataaagaagttaaaataacagagtctaaagagcgtgagactattgtcttgaaacaaagtatcagtagtttggatgaagtagtggtagtaggtcgtggttctcagcgtaaagtttctgttgtaggagctattacttctgttgatccggcacagttgcaggttcccgccacttctgtatccaatatgcttcaaggtcgtgtgccgggtatcattggtgtgactcgtagtggtgagccgggcaataacttctctgagttctgggtacgcggtatcagtacatttggtgcaaacgcttcagcattgattttgattgacggtgtggaaggagacttgaatacacttgaccctgccgatattgaaagtttctcagttttgaaagatgcttcggcaactgccgtatatggtgtgcgtggtgccaatggcgtagtaattgtaactaccaagagaggtaaagccggtaagttaactgttaacttcaagacaaatgccacatattcctattctccccgcatgccggagtatgtagatgcagtgggctatgcaaaccttgctaatgaagcacgtgttgtcagaggtaagaatccgatttatactaattctgaaatccaactgttccgttccggtctcgatccggatctttatccgaatgtgaattggagagatgtgattctgaatgactatgtgattgacaatcaacatcacctgagtctttctggtggtggtaccaatgcacgttattatgtaagtatgggtatcatgaaccaaggagctgttttcaaacaagataagtcggtaagtaaacataatactaatgtggattaccatcaatataatttcagagcgaacgtagacgccaatatgactaaaacaactctactctctttgaatatggaaacgattatcactaaacgtaattctccgggatatggtgataataacaatgcattatggtcggcgcaagctaatcttccggcaacaatcgttccggtgaaatactccaatggtactcttccatcatttggtagaaactcggatgaggtttctccttatgtacagttgaactatacagggtataagatcagtgaaacacaggccacccgtatgaatgccagtctgaatcagaagttggatttcatcacaaaaggattgtctgcaagaggcgtattctcatttaactataccggctactttgaccagtatcgtaccaagactccggacttatattacgccacaggaagaaagcagaatggagcattgatctctaaacgtacatcgagtgctactgatatgacttacagcgattatcgccgcattgcccgtcagtattattttgaaggaaatatcaattacgaaagaatctttggcgaagaccatcgtgtgaccggattacttaatgcctaccgtcaggaaaataaagactcttatctgaataatgatgatgacgacaccacattggatgaaagaattcgttccattcctaaacgttatcaggctatttctgctcgtgctacttattcttataaggatacttatatgtttgaattcaatgtaggatataccggttccgagcaattcaagaaaggcaaccgctacgggtggttcccggcagtagctttgggatgggtgcctactcagtatgaatggacgcgtgaaaaacttccgttcctcgatttcttcaaactcagagcttctttgggtaaagtaggtaatgaccgtatcaagaaaatccgcttcccgtacctttctactgtgtctaccgattatagctcagtaacatggcctggtagcaccgttggcgagagccgcgtaggtgccaatgacttgaactgggaagagacaaccaaaatggatattggtgtagacctgaaaatgtttaatgacaaagtggaactgactgccgacatctttaaggataaaaacaaaggtatcttccagcaacgtgccaacattcctgaagaagcaggttttgtaaccaatccgtataccaacatcggtggaatggaatcatggggatttgatggaaacataacgttcaaccataatttcaccaaagattttggaatgacagttcgtggcaactggacattcgcccgcaataacgtaacctattgggagcaatcaggcgtagtatatccttatcagtcttttgtagacgttccttatggagtgcaacgcggtttgatatctttaggtttgttcaaagatcaggcagatattgaaagtagtcctgttcaaacctattcttctgatgtgcgtccaggtgacattaagtataaagatgtcaatggtgatggtgttatcaatgatgatgatattgtaccgttatcctattcgaatactccgactcttcagtatggttttgctgctgaattcagatacaaacagtttactgccagcattttctttgaaggtgtaggtaaagtgcaatatttctatggggggtcaggatactatccgtttgcttgggaaacgcgaggcaatgtacttaacattgtagctgatcaaaagaatcgctggacaccgagagaatattccggtgacgccagtacggaaaatccgaacgcgcgtttcccgcgtctgacttatggtgagaataagaacaataaccgcgcatctaccttttggttggcagatggccgctatttcagattgaaaaatatcgagttgtcttatagattcaccagcgcatggttgcgagataagattagtgtacagaacgctaccttgagccttgtaggcgaaaacctgcatgtgtgggataaggtgaaactttgggacccggagcaggcatcgtcaaacggtgccgtgtatcctctgcaacggaaattcacccttcagcttaatgtgacgttttaatcccgtttcaattgtaacattatcataaatcgtataattatgaatttcagaaaaatatattgcatagccgctatggcactgatgtgttgcacaggaagtatgtttacctcctgtgacgactacctggatgtagactcatacttcgatgagatttttgagctagactctgtatttaaacgtaaggaatatctggaagaatatatcaatggtgccggaaagttattacctaatgaaggagacttgtggaccaatgcttggtcgccttatcagggagcttcggacgagaactttacatcatggaatgactcccgtcataaagctatccagctgatggtggacgaagtgactccacagagtgatttctataataactatggtacttggtataaaggtattcgtaaagccaacctcgtcttggaaagaatcaatgaatgtgaggatattactacgagcgatttgcgtgactttatgggacgttgttatttcttgagagcttatttctattataaactggtagaggcttacggacctgtgcccattgtgcctgagatggcttatgatgtggatgccagtgcggaaagcatgtcattggaaagagagacatacgagaattgtattaactatatctgcgagaatttcgagaaagcatacgaatatcttccttccagccgtacgtctaccctagtcaatctgcctacttcgggagcggcattggcattgatgggaagagtaagactgatcgaagcaagtccttggtacaacggaaatgagttttatgctgattggaagcgttcggacggtaccaactttatgcctcaagtcaaagacgaatccaaatggggaacagccgctcttcttgccaaacgtttgattaagggttcggaagctggtagctttaaatataagctgcacactgttgagagaaaactagacacaaaaccgctaccggagaatgtgcctgacgaaaactatcctaatggagcgggaggtatagatgcgcttcgttcttatgcttttatgttcaatggtgaaactccggcttataataatgacgagtttatttatatgtgcggctactctagtacagctggcgactctccggcatggattgctactcctacgagcctgggtggtggtaatgggttgaatattacttatgcgactgtgaaagctttccgtatggaagacggtagcgacatcaataactcaccactttatcccacaaattactgggaagccattggtggtagttcacagtctttctctgactatacacttccgtccgatgctgctaagatgtttgataagatggaaatgcgtttctatgccagcgtaggttttaaccattgctactggagcggactttcttacatcggaaccgaaggtaatcagactaagcagacagttacttactatgctaatggtactgctgcaccgtcgtccgatcatcctgaagattataaccacactggttttacctgcaagaagtacattcattatgtagaggatcagctgaaaggtatgatgaagtcgaaaactttcccgatcatgcgttatgcagaggtgctgctcaactatgtggaagcattgaatgagttgggaagtaatacatataccgacgaagagaatgggattacagtgagccgtgatgtagacgagatggtgaaatactttaatatggttcgctatagagccggtttgccgggcattacagcggatgatgcaagggatgtgactacgatgcgggatttgattaagcgtgaaagacgggtggagtttttctgtgaaggcagacgttatcacgatttgcgtagatggggagatgcaatcgatgcatacaatgagcctgtaacaggtatgaacattgctgcacgtagcacagaccgtaaagcattccatacggaaacagtgatcaataatactcgttcgcatcgtgtattctcttataaagattacttcctgcctatccctcgtacaacgatggataagaacccgaaactggttcagaatccgggatggtaattttgcacacgaagtacagaattaataattaagtaaaaaacgtttgttatgaatatcaataaaatactatatccgatacttttgttattggtcgttttaagtagctgtgattatgaaagcccgcttgataaggagcaatataagaagacactctatctgatcggcgcttccagcaatcttgtgactaaagaacttgcttatagcagtgaagtgcaggaaggattcattacagtgggtgtaagtggctctcttttgattgacgggaatgtggatgtgactctggaaagccataacagtgtaattgactggtataataaaaagttcaagttccttgcgactgatatcaaatatcagggacttgctaccagtgcttttgaggtaccttcttatactactacattgaaagccggcgaaacttatgcgagagttccctttaaagttaaaacagaaggtctggagtgcgattcgctctatgcgataactttcaagattgcttcttcttctgccggttatgagatcaaccagaaggactcggcacttattgtatccttcaatctggtaaataaatactcaggtaattacatcttcaaagctcttcggcacgaactggatagtaatgatgaaatagttgcatccacttctattactatagtcagaacattgaaagctacagaagaaaatgcagtgcgtttctataacgagcaacaggcagaaacaactgccaatatcaagaaacatgctgttgtactgaaagttgatgctggtaacaatgtcactatctcggcatgggaggattttgacttgattgatggtacatgtacttataatcagaactcgaaagtttttaatgtagattataagtatactgcggatggcaagacttatcagatggtgggtacgtttacctatcaggatgaagatgcaggtagcaactaaatggacttgtaaatctagtaactaaattaggttatcagcaaggtagaaaaaggagctgctttaagtcgatgaaataataaatggcaggtttaaggaatacttaaatctgccatttattttattcagccttataatttgtgacattgcaagatttgtggtagtttttggtcgttttgtgttctccaaggttagctgtaatcacgtatttttgtactatcactttaaaattataaaaaacaaatttcacgatgaactataaattactgtcagtcgccttagcttttttatatataggtatagctaccagctgttcccagcccgcccccgacctacgttatcagattgaagtggacaaaccgctacagacaatggagcacttcggtgcttccgatgcctggagtatgcacatccttggcttatggccacaggagaaacaaaaccagatagccgactggctgttcagcacagagaacgatgcgaatggaaaaccgaaaggaatcggcctgtctctttggcgtttcaatgtcggtgcaggtagtaccgagcagggagaagccagtcagatcggttcttcgtggatgcgtaccgaatgcttcatgaatgccgacggaatctacgactggaacaagcaacaggggcagcgcaactttctgaaactggcaaaagaacggggcgtcactaaattcctcgcatttctgaactcccctcctgtctattatactcagaacggcctggctaccaataccggtcgtggaggaaccgccaatctgaagccggaatgttacgagaaatatgtccgtttcctggccgatgtagtagaaggagtagagaagcacgacgggataaagttcaactatatctgtcctttcaacgaaccggacgggcattggaactgggtaggaccgaagcaggaaggctctccggcaaccaatcgggaagtagcccgaaccgtccgtctgctaagccgggagtttgtgaaccggaaaatggatacacagattatggtgaacgaatcttcggactatcgctgtatgctccgtactcatcagacggactggcagcgtggctatcagattcaggctttcttctgccccgacagtgtggatacgtatttgggtgatacgcccaatgtgccccgactgatgcttggtcatagttactggacaacgactcctctgagtgaactgcgtgccatgcgctgccaactgcgtgaagctctggataaatacaacgtcggcttctggcagtcagaaacctgtatcatggggaatgacgaagagataggcggcggtcacggcttcgaccgtacgatgaagacggcactttacgttgcccgtatcatccatcatgacatcgtatatgcgggagcgaagagctggcagtggtggcgtgccatcggcggcgattataaagacgggctgattcgggaatacacgaatgatgacttgaaggatggtcgggtagaagactccaaactcatgtgggctttgggtaattatagtcgcttcatccgtccgggagctgtccgcctgtcggtttctgctttcgatcaagcggggaatttaatccccggaggcgatacggaccaaaaaggactgatgtgttctgcttatcaaaatgcggacggctcatacgctgttgttctcattaactatgcgcaggaagacaaagagttttcaatcaataagataaatggcaagaaaactcgatggcaggtgtatcgcacttcggatgtagaaggagaagatctgctacccgttgagaaagtgaagagtggaagaacagtccggattccggcacgttcgattataactttattgaatcaatcgctttaatataagagtcaattatgggtttgttcggtcgaataaaaggccggtatgtcgcctttttcttttttaaagtattacatttgtacgcccgtccattgctaaccaaggcaatggacgggcgcaatgcataaaaaaggaggcatttcatggacaatagaggtaatattgtcatttatcagacaaaagacgggaaaacgtcgattgatgtgaagttggaggatgaaacagtgtggctgactcaggctcaaatggcagaattgttccaaacggacagaacttcaatagtgaagcatgttaataacatctataagtcggaagaattggtgaaggattcaacatgtgcaaaaattgcacatgttcagatagaggacatctctcattgcttttcttgttctgatgcagcatctctcacccttattgaagccatatttttctgtctttcccttattttacggtgtcttctacttccggcttaccataataccccggcatcggaacataaaccggactctgacgagtattgatattctgcaacttcttttcttctttcagccgtttgatatgtcgggcggcagtggtaagcgtaagtttgcaaagtccttgaaagtccgagcgggtcagtatttggttattactgaaatacgcggtcagcagtctgtctatctcttcgttggagcgtggcactgagtgtaacttcagtttactgcgttccactttgacgacactcaccgaacttctcagttttttatccgccttgaagccgatgtttgctttgagtttcatttggtttgctttcagcttgggcgaggtgatcggttccagactgttcagctttacctgaaagtagccgatgccgtcgaggtgaacacgttccccttcccggaggcgtgatcccataaagtggctcagtgattcgaggaccgcttttacatctccttcggtcagcgaagtcgcttgttgtatttctttggcgagatagtcggtgtcgatatgctgaaagttgactacccgtgcgtggtagagttccttgtcttcttcgtccttccgggcaggagacttgtagagttcaaattgtattgccatgatactgtttattgtattttatttctttttcttcttctttgtttcggctgtcagtttcttgatactgtcaaaatatgcctcttctacaggcgacagggttttgacatgatattttcggtattcgcccagagctttttgtttggcttgttcgtgagagatcgtgcctgcgttctgcaaaacttgctctccggtggtcgataagatgaggtccaggtgatgtatatagtccgacatatacatgggcgaacgtttgatagcttgtatttctgcgaagtcgaagtatccggaaaccaggttgttcaatatcttcagttccttttcattgagatagtttttagctatcagcacatcttctttccggggttgttcgccgggaaatgtggccagtcccataaatggcttttctgcatccgctcgttcgaagatcacttctgctgctgtgtggccgtgggcggcatagtgtaacttattctgcacgattttgaaaaaccggatggattcgtctgcctttgggtcatagtctacactggtggcatacaagtcgagaacctgccggtagagtactttttcagatgaacggatatcgcgtatacggttgagtagttcgtaccagtaaccgccgccgcctatttctttcagacgttggtcgtccatggcgaaacctttgatcagatattctttcagacgttcggtagcccagcggcggaagtgggtggcaactcgtgattttactctatatcccaatgatatgatcatatcaagattatagaaaggtatacttctttctacctttcttgtgccttctattcgaacctgtcggaatatctgacaggttgaattttcctctaattcaccttcttcaaagatgtgctttatatgttcaactatgttagtacgggaagtttggaatagttcactcatttgttgttgtgacagccaaacgttctcattctccaaacggacttcaagttgtgtccttccgtcttctgtccggtatatgatgatttcaccgttgtttttctctatttcgtccattgctttacatcgttataacatattcgtcgtttcttgtttgttataaagatatagctacctttgatctgcaaaactaatcattagtttccggacttggacagaactcgggttatatagtgattgtctgcttgctgtcaagcgttcatacataagttatcctgcctttatctttggtttatgatgcctgcattgttggatgaaggtgcttgcatcattagttgttcacggccgtggtaagcgttgctcacgtccgtgaagagcgttgatcacggccgtggtaagagctgctcacggtcgtgaacaactagctatatcagtagcaaagataaactataatagggagataaacaaagtattcctgcttcttttgggtattcgtgcagcttgttctttgtgcagaggcaataagaaagggaaatcattcttgtatctcgtgcgatgaaggaacatagtctgttggttgtagacggttttgttcatctcccttctatttactcattttacttccttaatggtattcttattaggaaaatatgcctatatttgtggcgtatcttctaaacaaagatatgttttattgatttggagataacgtttttattatctgctttgagaaatctggtaaattttgcgtctgcagataataggcggtcagtctccacgttcatttcgtatataaatttgttatatacttctaatgggcgtggagctattgcttattattcagacgcgggcttaccagagcctctcatggggtaatatagtaatagtttccgcgccttcttcatgaaggtatgcgaatacacaaacaaataaaaaatagtagtgatgaatgattctacttgtccccgtccctgcctgatgaagcttgatttacaaagctccaccaataaacttgcctttttgaaagacaactggcccagctttggacagattgaaagtatcgaccgattatcggaaacagaattacgatgtaccctttgcctgctggatgtggtgctggctgctttggctaaagatgaatgcttctgtccgaatcgggaaatcattcgtttggtattgacacgtacctatgtgcagaataggtgtgagctatgcgagacagaagaaatacgttcgaagttgatgaagggcttttgtacatgggaaaagaagaacggattgagcaggaagaacgaaatccggagaagagggatttctttcttttatggtgccatactgcgcatgctatcgaaagtaaacgggaaacaagaatagacgggatttgcccgaagataaaaggtgcttgaagtgaaagattcttgaggtgaaagatgaaagatcgggtgatagattgaaagatcatctttcatcatcggaagccccgatgaataaggagtttggcgaccaatggtgaaagatgacagatgaaagtttgttttttcgtcaggaggtgattgcgtttattctactactatctgcttatccttatactggaagtgtgcaatgcctaaatcattcagtacattcagtagagtctttatcggaacattccggctgaagcggaaatggactcgtttgtgtaaaaggtctgcagaatggcagatgacgctgatattataccaggttcctatattttgcagtacggttatcatttcggtgttgtcataataaaactcgtctttggtccatccttctttttcagtctgcgtggctttcgtcagacggatgtcaccgctagtggtcaatgtggcgcattgtccgggtactatttctttctcaaggggagaggctgctttgccgacctttactcgtccttgatacagggtgacggcgggggcattgccgggataggcatttacgtcgaatacggtgcccagcacttgtgtctgcattttatcggcggagacgatgaaggggcggtgggcgtctttggtcacttcgaagcgtgcttctccggtgaggtttacggtgcggtttccctgagaggaaaactctttggggtattccagacggctgtttgcacttaaaaggacgtgacttccgtcctccaatgtgaggcgggtggtcgtggcgggcggggtagatacgatgattctgccgttctcttcgatagtggtaatttgttccggtgcatggagggcggtgaagatttcgatgttctgctggatgccgtccttgcctgtgatgtgccaaggggaccaaagtaacaataacagggcaatggctgctgccacaccaccggataaacagatgcggagataaagtttgcgcttctgctgtgcctgccgttgcaggaatgtggtccattcttcccggacttcgtccggcagaggcagatcacccaacgcttcaccaaaggcattttgcagacggcgtgtttctgcgttttcggagaatggggtacggtcgtctgttgtcagttcacaatggtcgctgtctgctgtcagtccgtagccggaaccttcttcttctttgctggtacgtttttctttttcttccatagcgtatcctccttctttattctttcatggcttcgcgtagtgtacgcaatgctttggatatatgtttttttaccgtgtcgggactgatgccgagttgttgggcgacttcccgataggtgagatgttcgtaatagcatagccgcaggatggtgcaagtcggttccggcaggcttcgggctatcgtttccgctttctgcaacagtgcttcgtgttcccgatagttactttttacatcggccagcgttgcttcgtagagtgctttcgcattgtcccgttccacttgcagatgcttcatccggttgaggcaggtgttgcggactgctgtataaatccagcctccgcggtcggcctcgtccaattggtcgaagtgtttccaagcctgctccatcacttcgcttacgatgtcccgtgcttcctctccgtcgcccatcagttgtgaggcataacggaccattcgcgggtacatttccgtaaacatttgcccgaaggcttctcgttttgtctggtttttatggaacaggaacattctttatctggattctgaagctgcaaaaatagtacttttccccgagttcgactaaaaaatcagtagtaactttaatgtgttcacctaccacctccccctacgggtactcctccttcccgaaggaggagattgggaatactattgactttttagtcagcctctcttgtgatggaaccgacttgttggtcatctttgtgaaaccgggaattacaaacgtgacttttcgcttgctccggctccggttcctttatatttgctcttcgtggcgttgaactgatagctcagccggatgccgaaacgctgctgatcggtataatcacggttggaactgaaggtacggtcgccatagatggtgaagtatctgtagccggtgtgaaagatgtctttcgcggttaccgatactttcagcgcctggtctttcaggaatgatttggtcagttgggcatctactcttccttcggttttccagatggcgtaactttgtttggcgccgggcgccagttctcctttgatgttgaagaaccaacctttagggaaactgaagttgttatcaaaaatgaaatagaatcgcggttcattccagttttgggtaatgcctatggaggttgcgtgagagttgaaccagtcaataccggtggtgaactgaggctgccatatgccgatctttggcgaaaggacgatgctgcctccgtatcggttggaatgcggaatgcttgctctgccgaacagcaatacaccgggatggttgatgtcgtcatacggtcgggtgtagctggtgtacatattccagcaatggtcgtagttgaggctgaagttgatccatttccatccggcatcaaagaaagtcgcacgatgtatctgaggaacgagaaacgggtctccgctctggtaggagtacttgttctgataggtgacggcgctggtgagcatgtcataactgggactgtatttcagcgtccggtgagaaagggcgaagaaccagttgccggaggtgtatctgatgctgactaccggtatccagtcgcgataggtggggctttggtcgtcttggtgaatccctttctcgtagtaatctgtttgttgaaattcatagcgcagtccggcaaggatgttgaactttcccaatggcaggctgtagtcgatgaagccggagagcatcgtttgtttgatgcggtcgtcggcatcggcggagaagccgctttggagaaatacgtcgtggcggttggtgaatgtctcttctgtgccgaaactgagtttgcctttccagagtggggcggtgagcaggagcttggcggcatagaggtggttgcgtacgcggttgctcgaagtggcgtcttcggttccgttgttttcggcatattgacggatgcggtcccggccgtacaggtagtcggcgttgaagtcgatgttccatttgccgaaagtgccgttgtagtatccgttggctgcctgccaccagccggtgtgggcatctgtttggcggagagcgtgcaggtggtctacttctttgccatcttgcaggatgagggtggtccctgcattggtagtatgtgcattgcctatgttcgtgccgggcatatagcgcataccgaatgactggtcttcgtcgatttcgtagttgaatcccagttcgccgttgaaggtgcggtaggtttgtttgcttttgttttctgtcgattggttccagtcggacgaagcataaatgtcctggctggagatgttggttgtgtgattgttgatttccgcaaagtctccttttacgaaaatatccagtccgccggtacggtagttcagggatatgccttcgttgccgatcggttcgtgtccttgcgagtagtcggtgtagaaactgccgctcattccctgtccgcgtttgcggatggtgcgcagacggatgacggcgcctaccgaagagccatattgtacgcccggtgtagtgatgatttctgccgatagtatttcattggcttgcagacggtccagttcggtcttgtctctgactttgcggccgttgatatagatttcaggagtgcctctgcccagtacggtaaattctccgtccgagccggtgacaaaagggaggtgggagatcatttctttggccgatcccatcagtgaaaggggtgttccggctatattggccttcagcgttccgcctttccgttctatcagcgggcgggaggcggtgacgactacttctttcagtaactctgtgtcgggttgcaggcggatggtgttttgttgccggcaggggatgatttgcgggcgatatcctatgtaggtcgctttcagcagacagtcttctcccgctaccgggggcagatggaaggagccgtcttcttcggtcacgcttccggcaaggaaactggaatcggcggcaagggcgagaatgttgacaaagggcaggggggctcctttttcgtcatatactttgccttctgtggcgatggctttgtccgatttcttccgctgcacgacgaaatactcttcccgttcgatgcaaaggaagggtttgccggccagtacaaggtcgatggcttcgcgttccgtcttttcgcggatgctgacggtcacccgataactttctgttccgttgtaggtgaagaggatgttttttcctcctgccttttccaactgcttcagtgcttcgggcaggctttcgttctttagctctagtgagaatttcttgatggcggtctgcgcctgcagaggggaaagggcaaaaaataaaccgtatcccatcagtaaccagctgattgctgtccaagtaaaaccaaactgtcgtatcatacttctgttttaatgattttacttatactacaaccaaggtgtctgatcgggtacggtttatccgttttttttttcgatgtttatttcaacttcttctgatactctcccgaacggaggatttccaatgctttctgcacgctttcgttcgttgtattcatgacgcggaaatattcgttcatatcccagaggtcacgggctatcagtgctttgagctgtgtcttgatcagcggaagtgccttctgatactgctcttcgttaaacttcaccccttctttctcacccatttcgcggagggtggcgagcatatcgtcgtcaataacaaacttttcgttgaagctgtcgaacttcttatatttatcggccagttccttgcggtggtcttcgatgaatttcattgtgaatttgatgatgactcctttgccgaccagtttccggtgatagtccgtgtagagtgtcgtatcaatcggaacgaagtagtccggcatgatgccacctccgccgtagacggtacgtttcagtttcttggtctgcactttcaatgagtcggggaagtggatgctgtcggcattcatcagttctccgtggttgaagcggtctatcaggtctttattgtaatcggtcgagctgtcataaggcttttggatgcaacgaccggcaggggtgtagtaccgtgcaatggtcagtcggatcatggagccgtccggcaggtcgataggacgttgcaccagtcctttgccgaaagaacgtcggcctacgatgatacctctgtcccaatcctgcactgcgccgctcacgatttcgctggcggaagcggtgtattcgtctaccagtacgatgaggcggccgtcacggaactctccgtttcctttggcgaagaactcgctgcgctgtgcggtccggccttcggtgtaaacaatcagttccttctgtccgaggaattcgttggcaaggtcgatggcggcgttcagatatcctccgccgttgccttgcaggtcgaggatgaggtctttcatgccttgcttttgcaggtctttcattgctttcttaaattcttcggcggtggttgcgccaaagcggttgatgcggatgtatccgatctttggctgaatcatgtaggaagcgtcgagactcaggataggtatcttatctcttttcacggtgaacacgagcgggtcttgtactccacggcggacgatggtcaggttgactttcgaacctttcgggccacgcaggcgcttcatgatatcttccgtgctcatttttactcctgcgatggcggagtcgttgacggcaatgatgcggtcgccggcaaggatgcccactttctcggaggggccgttgctgacgggttgtacgacgagcagggtgtcctcgatcatctggaactgtacgccgatgccttcgaagttgccttgaagcggttcgttcatcttcttcacttcttcggcatccgagtaagtggagtgcgggtcgagctgtgccagcatcttgatgatagcttcttctaccagtttgtcttcatctactttgtctacgtagaagttggaaattgcgaattccgccatttggagtttgcgcatggcggcagagccgaaactttgggcctgtgcagcagacgttgccaacagacaaaccaggagggcgtatactttaatcttcttcatcatcattaattattatttcaagtttcgcaagttacctttgcgttatccaaactatcttcattcccctgaggctgactttaaagtcagcctcaatagagatactaccgactttcaatttatctccattccttcggggataaactggctgatatctttgttgtaagtcagcagctcgcgtacaatcgttgagctgacgcaggtcagttccggttctgtgaagagcaggatggtttcgatgcccgccagtttgcggttaatgtcggcaatcgtttcctcgtactcgaaatccttgaccgtgcggatgccgcgaacgatgaattgtgcttctacctgttgggcaaagtctatcgtcagacagtcgtaagacatcactttgatgcggggattgtccttgtagagattccggatcatttcttctcttttctcgatggggaaataggtattcttgttttcgttgataccgatcccgatgattatctcgtccataaaggtgagtgcacgttccactaccgaataatgaccgatggtgaaggggtcgaatgtacccggaaatattgcttttctcatgatgccaagtcttcttctataaccagattgtctataataaagttctgtcgttccattgtattcttgcccatgtagaactccagcagttcttttacggcatctgtcttacgcaatgtcacttgttccaggcgcatatccttgccgataaagtgcttgaattcgtccggtgatatttctcccagtcccttgaatcgggtgatttccgggttggggcttagttcgttgatggcgttcacccgttcgtcctcgctgtagcagtacaccgttttcttcttgttgcgcacgcggaataacggcgtttgcagaatatatacgtgacctttcttgatgaggtcggggaagaattgcaggaagaacgtgatgagcagcagacggatgtgcataccgtccacatcggcatcggtggcaacgatcactttgttgtaacggagtccttctatgccgtcttctatatttaacgcagcttgcagcaggttgaactcttcgttttcgtagactacctttttcgtcagtccgaacgagttcagcggtttaccgcgaaggctgaatactgcctgagtgtttacgtcacggcttttggtgatggaaccgctcgccgagtctccctcggtgatgaagatgcaggagtcttcttccattcctttccctttcgggtcgttgaggtggatgcggcagtcgcgcaacttgcggttgtgcaggttggccttcttggcacgttcgcgtgccagcttcgtgacgcctgcgatggctttccgttccttttccgattcctgtatcttttgctgcattacttccgctacgtccgcgtttttgtgcaggaagttgtctacttccaacttgatgaagtcgcctacgtatttgttgactgtcacgccgccgggagtcatgttggtagatcccagtttcgttttggtctggctttcgaagatcggctcttccacattgacggcgatggcggcaaccagtccgttacggatgtcggtatagtccatgttcttgttgaagaactctttgatggtacgggcgatatgttctttgaaagcactctgatgggtacccccctgtgtggtgtgctgaccgttgacgaaggagtaatactcttctccgtactgtccggtgtgagtgaaggcgatttcgatgtcttctcctttcaggtggacgatgggatagaggccggttgccgtcatgttgtcgttcagcaggtctaccagaccgttgcgcgacaggatgcggtgaccgttgtaaatgatggcgagtcccgtgttgaggtacgtatagttacgcaacatggtctcgataaattcgggcttgaagcagtagttgacgaacagcgtattgtccggttcgaagaagataaaggttccgttgtcctcttcggtgtcctgcgtcacgtcggtctgcaggtttcctttggagaatgtggcgatacgcactttaccgtcacggtaactgcgtacttcaaaacgagagctcaatgcgttgacggctttcacaccgacaccgttcagtccgacgcttttcttaaatgccttgctgtcgtatttaccacccgtgttcagtacgcttacggcttctaccagctttccctgcgggatgcctcgtccgtagtcgcgtacgctgacgcggaggttctcttcaacggtaatttcgattttcttaccggcttgcattttgaactcgtcgatactgttgtcaatgacttctttgaggaggacatagattccgtcttcggcgtgcgcgccatcgcccagcctaccgatgtacataccggggcgtgtgcgcacatgttccatgtcgctcaggtggcggatgttgtcgtcagtgtactctactgcattgttgttgtctacagatatcaattcgttctcttccatagctgttatttaatctctttggtgaacgcacggcggcgcttatgttgcttagtctcaaagtaatcccattgtgcctggacttttccgttcagttccagttcggggttgctttccgcaaagataaaacctaatttttgataaaccggaattaaatcggaaaataacaaagcgttaacacctttattctggtactccggtttgactgctacaagcagcaggtcaagcattttggcacggcgtttcatgaacagtgctttcagcagatagaaccatcctagagggagcagacggccgtgtgacttttgcagggcctcggcaagagacggcatggagatgcctacgcataccagcttgtcgtcggcgtcggtaatgagggtaaccatccgtaagtcgagaatcgggagatacatctttacgtactggttgatttgccgttgcgtcagcggggagtagccgtagagcgggctgtatgcttcgttcatcagttcgaagatttcctgtccgtagtctttggctatttttcttccggaggtgtatttctttatcttcaggttgtattttcgttgaatcagttcggagatacgcttgtgcttgtcggggatggcatcggggatgtagattttgtattccacccagtcggcgtctttctcgaaaccgagtctctccatgtgtacggggtagtacgggtggttgtagatagtagccattgtgctgagttggtcgaatccttcgatcagcattccttccgcatcgaaatcggtgaatcccagaggacctgtgatgtgggtcatgccgcgctcttttccccagtcttcgacggtcttgatgagtgcggatgatacttcggggtcatcaatgaaatctatccatccgaaacggacgttcttgcattcccacttttcgttggcgcggttattgatgatagcggccacacgacctacgattttgtcgtcccggtatgccaggaagtaatctgcttcacagaactcgaatgccgcattcttctttttgttgaatgtgttgagcatatcgtcgtaaaggtcgggcacggaatatggattgcccttatacatcctgtaattaaagcgaataaacttcttaagttctctctttgtagagactttcttgattgtaatagccatatctcgtatttatgattgaggggcaaagatacgtgataatctttaaattacaacgctacgggtgggaaaaactgtacagggggaggcccgattccggaaaataaaaaggtagtgaatcgttgcttggactgatatttggagtacctttgtcagaaataactataacacaaatggaactgcagattattcagaataaaatatatgagatcagagggcagaaggtgatgctcgatttcgatttggcggaattgtatgcaacagaaacccgcttgttaaagcgtgccgtaagacgtaacattgaccgttttcctattgactttatgtttgaactctcgacagaagaggctaactctttgttatccagtagggtatcccaaaatgggacaccccagtataacttcagtgcttacaagccgtttgcttttaccgaacagggtgtagccatgctttcaagtgtcctgcattcggaagtagccattagggtaaatatcaatattatgcgtgcttttgtcagtatccgccaatatgtattggctagtgaagccaagaatgaagaaatagaagagctgaaacagcgcatacaagagttggagaatcaaggttgcaaagctttcgcaatgatcaatcagataggtgaggaaacattggaggcaatcaacgaccttagcgaagatacccgcaaagaattggacggcatctatttagctttatcgcaattggctgataaacagaaacaagtaccccagcataagaaacgtaaaccgattggtttcgttcattatgataaggaagagtgagaggccggcaaatttagttagatgcaaagcagtaaacattgccggcaaagtcacaaactatcattctgtttcccgatacggctatcgttgagaaaactggtgctccgaagtacaacttgtctttgataatccctgttgactggtcgatggcgtataaatacccgtcggaagctccgatatagacaattccttgtgaagatacagggcttgtttctactcccgcctgcggcgtagaagaataaggagcagtgtatacaagagaaggcaaagtctcggctctccatttgatgaaaagagtcggtttgtcgagagcgaaaactccacggtctgcgctgccgaagataatctcttgttcggttacgagtggagtagatgtcacgtccagattggcggacagttccttttgctggagtactttaccggtttgaggttctatcaggaaaaagcttttggaggagatgagccataattttccgtctttgtagaccggagaagcacctcggttgccgagtccgttgtcggagagcttccagagttgtttgccagtgcggatgtcgttgccatacagtcctccccattgggtaccactgattagtacgtctccggcgatggttaacgtggtggtcgagccttcccgttgtttccagtccgtgttggtccatatcacttttcctgttttcaggtcgtaggctgaaagtccggcaccgattccggcatagacgattcctttgtcaattgtcagtccttcggtcagatagggatagttctttaagttgatgtattgttgccacagtggttttccggatgctgcgtcgagggcgtacagattgcaggaggcatcctgggctacaacgattccattttcgcaggcaatggtattctttaccgagttttccgtgcggaacttccatagttgtttgccggaatggaagtcgaatgcacagatataagtgttgagcgacgtgttatcatcggtagtggcaatgaatactctttgtccggcgatgaggggggaggtcatgaagatgttacttcctgtgttcgctgtccattgtagttgcagggggagtttgatttgggagtcatttattccaccggagtgacttgcgttctgaagtagggtattccagtccttccctgcgatagcagtcgatttgaaatctttctgataaaggaactgactggtggcagtcgcttcctttccgtcgttgaaggatgaagtcactgtcaggttcagtttctttccgttttcgttagcgggtatttgaatatttccgctccagttccagtcggtgaggggcgacaggttgcctttggctatttcccggttgtcttccggattgctcagcacataagaaacagacgatgtttttgcctgtgagttataggtgttgaccgagaccggaagctgatagccggtttccggatgtatgggggctgcttgattcttcatcggagaaacaatagcgatttgcggttcgatgaaagtataacgcagttgcgttgtgaggtgatcgttggcatctatctttatgtctctgaatgaagaaggggagtgatcgatgcctcctttgtccagtgtgccggtgcagatggtataaatgcctttctgattgcggacgtagttgtagtgcatatgtccgtaaatttgtgctttcgtgttgaaggtacgaaagtcgaggatatcctttttgtctgccttgaatacgaagttatcgccgggagtaaacaggtcgtggttaaaaagaacaagcgcctgatctttcttcatcagggcgaggtcattcttcagccagttgtatacatccctttgcgtgtaatcggtcgggttgtctccgtggtcgatgggagtaacgacataatgcacgttgccgacatcgaacgaataccatgtcgggccataaatcgattcataaagttcttcgccgtagttgcctttcaccaggtcgtggttgcctatgcagtaatagacggggcagtccattgtttgtgcattcacaatttgattgtgcactgtgagtcccggttcgtagcagatgtctccggtatgaatcagaaaagccggttgttcgttctttatgtattgttgtaggtcggtgacccaacgccccactcctccggtcacttccgtgtcggtgatatggataaaggagtgttctctggtcttggtccgttcgctttcggtcactataaaatcatagctttttctgtcttccttgacagggaggtagaattgttgtgtctcgaatccggcaggtgtagtaatgctgataaatcgggttttcttgaatcccgatagtgagaaccggccttttttatctgtttttactacgttcattccgtctgttaccatcactcctgccagcggtttgtctcctttgtcgaatgtgcccgattgattggtgtcgacatagacggttcctttaaattgtgcgcacagcggaagatatagtaaaaatgacaagagtattacggatagtcttttcatggtcggttctctgttttattaggcacggatgacacgggttaacgtggtttttaattgaccgatcttttaaatccgtgaaatccgtgtcatccgtgcctaaatttatgatataaattaattatgctgatacttatcgtatttgtttcatctcttcgttgtatctcgcttcctccttacacaaaggcttgtaccaggtctttcttaatatcagcgtggtaatcagaagcaaggcgatagaactccagagtcctaattgttcgcggacaacgaggtacatcgggatgatggtaagcgtacattgccagatgattcctatcgccacattgaaggcatcccttttgaagtttttattcgcctgaatatgcgggtagcgggcgattgctttctcctgaatcggtttccaccatccccacgggcgtacattgacatagaagttgatcagagtctcttcatctgtagccggagcgctgtaagtcccgatgatacatccgatcagagagacgccgaacagtacggggaagaaataaagtacccatgcatccggaacggtaaatttcattacaatagctgccactactccggcagtcattccccagaagtaaccttcaccgttgaaacgccaccaatgccatttcagtacgttggctgcgatgtatcctccgaacagtgcacctacaatccactggaagatttcattgatatctttcaggaagaatccgatgacagtgctcaccaccactactgccacagagatgacataactgctgcgtatctgagttttcacgcttgctttcggattgatgtatttcagataaatatcatttacgatatatgcaggggctgcattgacggtagaggcaaaggtcgacatgaaagctgccagtagacctgccaataataatcctgcaagtcctgccggaacatatcgtgtgatcagatggggaagaatcgtctcaaagtccgtgcgggtcacttccatctgtgtcagtccgccgtcttccttgaagaaatagatggcaagtaatgcaaatcccataatcatcagataacggggaattaacagcactacggatacggaaccgctcatcatcgccgcttctttgggagacttgcaggacagaattttctgcatatcataattgggcgcaggccctgccatactcatgaagatgcctttgagcaacgccatcatgacaaagatgcctatcagactgtaaggttcgtttgccattcgttcggtcagcaaactcatcctgctgctccagtcaatatcgagcgtccatccgaagaaaggggaatcccatccggcaggtacaaaggagtgtatcatatccggcgccaccatctgcataccgatcactacgataacgatgcctgccaccgtcatgataaggaactgtacgacatctgtccatacgatgctcagcattccccccaacatgacgtagaaggtggcgatagctgtgaagaagatgccatatacatgcggaacatactccggtgataccgtgaaaggaatgtagggtgaaatgacttcccagggaataaagatttccatgaacttgcctattcctatgaatccgtaactcagaaatccgagtacgcttaataacgcaaatacgacaacgatggtatgagagagtgtcgctcccttgcctttaccgaagcgggttttgatccattcggctccggtgagcacattggaacgccgcaaccacaccgacagataaaccatgaggaatatctgattgaataccggccacagccagggaatccagagacttttgaatccgtaggcaaatgcccagtaaaccattagcatcgtaccagtgatgtcgaacattccggatgcattggacagaccaagcatatagaaagggagtgatttgcctcccaggaaataggagtccatattttgtgcggcccgttttttcagtatgagtccgatgacaatcatggcaatgaggtaggcgcagatgatcagaagatcggatgtgtgtaatttcatgttgctattttgattaggttttgtacattaataatctatcaggtacaaaagtaggtcgaatgtggggaagaaacaaatattattttaactcatactgatactatctgatactatttatctgacttctcaggctttaatagctgacacgtcaggtgttaatacttgacgtgtcagctgttaataccctgcaactcagttgttaatatccatcatgcagaatggaacatcctgaaagacagatgataatactgcttccggaactataatataacggcattttccgacatcacgagcttattggcttctatgatatcgtatatgcttttcacggaagtcgtggaacggagtctgtcttccggtgtatgccggcagtaatcgattagtcgttcgatcgtagaagtcgctacgtgcatccgtgtgtcggaggaagcatagtagatgtataccgttccgtcttcatccgcgatccatccgttggaaaacaagacgttggatacatctccggttctttcttctcccacaggtgccatgaagtaacctcccggctgggcgattactttgctggggtcatctaaagacgtcatatacagatataggacatatctgagtccggcagcacaggcacggactccgtgtgccagatgtagccatccttggggagtcttgatgggatgaggcccttcaccgtttttcacttctttgatcgtgtgataatggcgctgttctatgacgatttccttcttgaccactgcatgagtgatatcgtctatcaatgcccatgaaatgcctccaccgcttccggcgtcgataaatccgtcttgcggacgggtgtacagcgcatactttccgtctacgaactctgggtgcagcaccacattccgttgctggctttgggagacgaggttgggcaggcgttcccagtttttaaggtccctgctgcgtatgattcctgctgctgcgatggccgaagtgaggtctcctgcgggtgcgtccggatctttgctttccgagcagaagataccgtatatccatccgtcctcgtgttttgtcagacgcatatcgtagacgttcgtttcttccggatataagtccggcagttgtaccggatattcccagaagcggaaattgtcgataccattgggactttctgcgatggcgaagaatgatttgcggtcatgtccttctacccgtgccataacaagatatttcccgttgaatttgatagcgcctgcattgaatacggcgttaatgccgaaacgttccatcagatagggatttgtttccggattgaagtcgtatctccactccagcggggggtggtctgctgtcagaatgggatatttgtatcgttcaaaaacaccattgccgggcagtatcttttcattttcacgtgagatgagctcatcatattctttcgtgagaatatgtagtctgttatcatatctattcatattaattctcaaattataaagagtctatatacgattcttttgcattgcttgacaagataaaaagagactggttacaatacagacaatacaaaggatatactgcgttgcaagaacaatctctttttatattcgtcactttaaaagcatgggggtactttcaaaagatatgtgtcaagtttacaaattattgtttggtaatgaaataagaacgaacggtatagcccggttctatgaagctgacccaataccagccatcttctattttatcaattcggcaatcttctatagggtactctttgcttttgtctactttaccttttgccactttatagagcataggtttcgttttggtaccgacactcagatcacctgtgaattctactgcgaagccagtcgctgaagtggtcgttgcactctttataatcaactgagagatattgaattcaggagaatagatcgcttcaccggcttttgatgtagaaagagactgataagcgtaagaaccagctatcagataacggtacgaaggattcaccagataaggatcgtcaatggtattaacataaatatcaatagattgtccctctttatcactgatagttatcgttttgttatagcggtatcttttcagtccttcgacaataacttctgtcccgttttccgccattgagcatttcagataggtggcagatccattacctttacaagtatattcgccattaccatccagaatcttaatagtgacaggttcatcaattaccagataagtaatatctgcgctattgtctacaacaagtttcctgatcacttttaccgagatatcagccgttttgttatgtttgtcttttacagaaagcgtggtagtacccggagcgatggaagtaatatctattttaccgtcttcgctgattttggcggttgcaacagactcgtcggaagaagtaatactatatccaccgtttccggtatatacttcgagagttttggattctccaaagaacatagtagtagaacttgtttttattaccagttcctgttcttgatctacaatgattttcacatttgctgatttctttgtccagtcggtaacagttaatgtcgcagtgccatattccaggcctgtcacaattacttcattgcccgaaatgactgctgttgctactgttgcgtctgaactgttcactttgtagccgccattaccttcgacgatactgaaacttccttcggttgtttcatccagattaatcgttaaagtctctgcatttacagtcagatttgcataactaggtaggtcttcgtcacagccggagaatagtccgatggcacaaagtgcgattcctgctaagtatattatatttcttttcatggtattctctaatttataattcattattcagcttcgtggccttttattttaccggtcacagttactacactgtatttaggaacagtaatggcacgcaaaccgcttgaagacggattgatctttttttgttgccatttcacattttcactggatgtataagttctcatattttgaaattctactccctcgatctccactaaagtagagaaggactccttttcagaagcgttgaccagaacgatggtataagtatcgtcttttatataagcagaaaccaataactcttccggaagcttgtcggcctctgaagaaacagcttctacatccacacgtacagcatcaggttcgatgtacttagtgtactgtccgaaagtatagtagcggggtactctatagtaggttgtactaggcaatgcctcttccagctgtatcaggttttcgcccgttgtgctgcaaggacgtgcacctgcccaccatacaaagccgcttacattaccatttgccatataactgtggaaggtttttgcccacttcattgcatccggccatgtttccttacggtccttatcatcactgatctctgtctgccagatatggagattatgcttttccgcttgttcgaaaggtgcgatgcttgcatctgttgtggaatagccgtgaccagcaacaatcaaattcgggtctgccaattcaggatacttttcaaggcttgaattaatatgtttagtagcccatgaccaccaggcattctcgccatataccagtttcatatcactatgtcctctcttgttcatctccggacgaaggttttcgagtacgaacttagccatttggtctacgctccaagagcagctggcccatcctcccatactggatagaacatccggttcattccatccggacatcgcatagatatcaatgcccaatcctttttcatacgcatctacaaaatccatcaggtattttgcataatcttcgtagtaatctgccttcaagtttccaccattaagtttaccattgcttttccatacaacagggggacaccaaacagaaaagaagaacttgacatctttaaattttttgttgatatggtcaaccagccacatttgtcccagttgcgtctgctctccgcactcttcaccgttgtagttacgccaatagttattgatcatagaaggatcatcggggcgtaacatgaaattgcggtccattttgaattcaatatcacccgtttccggattacaataagaagggaatacttcgccacggaaaatattcagggctaaacctgatttaccgaacaagtcttccatcaccgcatcacgttgcatggtattccaaatacggtgtgaccatccacagaacgcacagccgaaaccgtcaatcacttggtgtttgttctcttctccaatcttcatctttatgacagcggtagtggttggttccggcgcaattccgtcatcttcaaagttttcttctacagggtccggaatgtatacatcgctgtgatctaaacttccatcatcgcaagagtatcctaaaaagaggaaaagcgctataaataataatgaatatatctttttcataattttctaatataaatgggtttaaaggtattatctccacagttcagtttgttccatggcattgttattgtttaactcaccggaaggaatcggataatatctgtatttctcttggaaattatctgctccctgcttttcatttgcgttgaagattgtcttgatctcttgagtggtataccaacgtttcaagtcgtcaaaacggtgtccttcaccgaagaattcaagtaagcactgatgttcgatttcagccattaaatcagcttgggcaaaagtcttgtctgccaatccggctcttttgcgaatgatctttaatgctgtatttgcaccattggcatcgtttgtcatagcacaggcttcggcatacatcaacagtacttctgaaaaacgcatagcacgcagattgtttgctttaccttccttatgccccatattatcggcattagtcgcgttcacaaaatatgcagtgtactttttcagcagaaacataccgtctccctggctgaatgtgggagcacctccggtcattttaccactgttgccatcccagagatcttccatcgaacggttgccgccataccatttttcattcttaacaacgtcattcatagattccggattaaagaataaacttgcgtacatacgtttgtcaaactttgtatccgatccggcaggacgttcttctttcacaaactggccgacagcgaaactggaaggcatcaatttagcccaaccaccgccggcaaccggacctacaaactggggaagagagttaccgaggctgatgccactttcgttaccccatgtcaattcaccatcactactatattgcaattcgaatacagattcttcattgttctcttttgctgtagtaaagttttcagcgaagttctctatcaggttgtaacgtcccgtatagtaaggagcgttcatcaataattgcagttgtgcttttgcttcaggatacttgtgctggtacagatatactttggcaagcatagcgatggcggcccctttctcaatgcgacctttttcatcaccggaacgggtcacaggaaggttacagctgatagcatctttcaaatcatcttctgcctgtttccaaagctgttcttccttggcggcgggtttgttgctttcgtcttcgttggatggagccacacgcagaggaacttctttatagttgtgtactaacaggaagtattggaagcctctcagaaagagagcttctcctttaatggtggaacggtcttcctcactaatccctgttgccggaaccaaatcaatattcttcagtaccagattggcacgctgaatacctgcatagagtgctccgtatggatcatttcctgttgtactggagttttggaatgtagcgatggcccacatggaagcctcttcattcagaatcgtaaagatatcgtcaccgcggctgttcagattcaaccatccgtcgaatgcaccgtaataaccgttcatttgatatttaatcggtgagtaggcggcagcaagaccgctctctgcatcagctttattcttccagaaattattttctgtgaagtgattgggatctgacagatccaaaaagttggattcgttgcacgaggtcaatgctccggaaaggagagtcgccacgcatatgtatgataaccagttctttttcatgttataaattcaattagtgtgtattatcttcgtattataagctaacctgaataccgaaagagatagtacgtggtagcggataacgtccttggtcgattcctcttgagaatacgctgtaagatgcgccgatatctacactgccgctttctccgaggtcgggagaatagcccgaatatttactcaatgtgaagaggttctccattgatgtgtaaattcttacattttccagttttactttcttcagcaagtttttcgggagtgaatagccgatatccagtgttttcagacggaagtaagagccgtcttccagccatctgtcggtatatgccaatccattatctgtaccgtctgttttagagaaacgaggaatgtcggtgttctgattatccggtctccatgagttagccagcttagtgctgtagttgccgttgaacttacccgattcaaggcagtaacgctgatagttatatattttgttacctgtcatgccgtcaaagaacagaccgaagtcgaatcctttccattcaccgcctaagcgcaggccgaatgtaaaatcagggaacggattgcctacatcatgttggtcattctcatcaataataccgtcaccattccagtctttgtaacgtacgtcacccggttgtgcgcccggctgaatttgtttgccgtccttattcttgtagttatcaatctcttcctgtgtgcggaaaataccgtcagtttcaatcaggttgaagtatgacatagggtgtccttcttcaaatctgttaataccgcgtccgccggcaccgtgagctgagtaaccggaaatagccatgttgttaccaccggcagtaatcttcgttacttcattcttttcagtagtagcatttgcaccgatatagtagctgaagtcgtcaccgatagtactgcgccaattgatggataattcgaatcctttgttacgtacctggccggcgttctggatagacagaccgctgataccggtagaagcagcataagggacaggaagtaatacatcatttgtattttttacataagcatcggctgtcaatgttaatttgccgttcaacagactcaggtccagacctgcattgaaagtttctgtactttcccaagtcagatcgttgggggatactgcggttacattaggcaactgaccgaaccaaatgttattgccttgcaggtaattcatgccatcggatactacgctgatggtaggatagtatttatccatctgctgattacctagtttaccgtagctgaagcgaagtttgaattggtcaaatacattttccaatggtttgaagaatttctcacggttgatgttccatccgatagatgctgaagggaagctaccgaactggtgtcctttcttgaaacgtgaggaaccatcgcggcggatagatgcagaaagcagataacggtcatcgtaagaatacatgatacgtccgaagagcgaaaccaaagccaattcgtttattgagctggaggctgtcattgatttaacgttacccgtcattgtctcaatgaactcagggatatctgtattgctgccgttcagaccgtagctcttgtctttttgtgcagaatagccgaccaatgcggaaagattatgtttgccaaatatcttatcatagttcaatgtattctccaatacccatgattcgtaatcggcagagccttcactcaggtcaggggcatcgtttttaccataagttcccaggtcgtaggcacccgtatatgtacggcttttggtgtggtcctttctaagtcctaagttcagtttatatttcaatcctttaataacttcagcttgtaaataagcgtttaagaagatctgagttttttcattgtttttgttcaccgtactataatatgcatacggattcggaagattgatgtctgcggaagttccccaaccggtcgggtttgtcggatcaaagactggaactactgaagggaaacgcaaaatttcacccatagtatcctgattaatgttaccttcacccttagagaggcggactatcatcgattcaccgataatcaggcgattatccagaaaagagtaatcgcttttcaaacggatattatatgattcgtgactggtgttgcgaagaataccttctttgttcaaatagcttgcggacgcactgtatgaagcagttttagaaccgccgctaatattggcgttggctttgtaagtcattgcagtacgaagcataatgtcttgccagtctgtacctgcacctacaaaaggaacagaaccaacttctgtgccataaccgtctgctgctaaattataataacgtgcgaaacggctgtattcttcaccattaaagacattcaacgtttttggagtctggctgaaacctgtgaagaagtttatatcaagtttggtaggcatatctttgcgcccgctcttcgttgtcaccaatactacaccaccggcagcacgagaaccatagatagcggcagcggcagcgtctttcaacacttcgatagaagcaatatccgacgggtctaccatgctgaggtctccgaaggaaccatcgatgacatagagtggatcattatttgaaagagagctgataccacgtacgttgatagtcatcccttcgttcgggtcaccacttgtacttgctacggatacaccggcaatttttccttgaagagctgtgcccacatttgttgcgacagcgccgttcaactcttttgtacctactgaactgactgctccggagagatggcttttctttactgtaccataaccgatgactacaacctgttcaagagctacgttgtcttcttccagactgacattgattggagcgtttgaagttattgtacgctctatacttttcatacctactgttgagaatacaagaatatcgcctttattgacgttaacggcatatttaccatctatgcttgtaattgtaccagtgtctttcccttttacttttactgtaactcctggtaaggggtcgtttgtcgttgcttctgttactatcccttttacttcaatgttctgtgctgttagtggaatactaaccaagcagagaaaaaggaatagtagaaattgaatttttcttctcataatttattgtattagattataaactctgttcaactgctgattgctccatggaaacctcaatcagtaattggatgatgcaaaagtaggcgataatgtaatggcagacaagtattattttatcccattctaatacttttctataatgtggcattacaaatatattaatgtttttcttaagcggaggaattacttataagaaataaaatcgttataactgcccaatttgttacttataagaaataaaaatgctatatttgctaaatttgttacttataagaaataaagatgagaaagccggaatattataaaagagagttgtatgtacaacgtataaagccttttgtcgatacacagatgataaaggtgattgttgggcaaaggcgtgtggggaagagctatctgttgtttcaactgatggatgacattcgtgacggttctccggaagcagatatcatctatattaataaggagttatttgagtttgatcaaatcaaaacttatgccgacttgataaattatgtgtctgcgacaagaaagggcgcggaagataagtgttatctgtttattgatgagatacaagatattgaaggttttgagaaggccctgaggcatttctttgcggaaaacacttatgacatctattgtacgggaagtaatgccaccatgctttcgggtgaactggctactttcctgagtggtagatatattgaatttaaagtatacggtctgacctataccgaatttttggagtttcataaactggaggattccgttgaagcgtttagccgtttttaccggttcggcgggcttccttatcttgccagtttgccttttgaagagcaccttataatggagtatctgagaaatatctataatacaattatattgaaagatgtggtgaatagatatagtatcaggaatgtacggcaattgcaggatctgacggtttatttggctgacacgattgggaatctgttttcagcaaataaaataagtgagtatctgaaatcacagagggtagatatgttgcccaaaacaatattggaatatcttacttatttgaatagtgcttattttgtaagaagaatccgtccgatggatattcagggaaagaaacaattccagatcggagagaaatattattttgaagatttaggaatacgtaatgcgattcgtcctttccgggcgaccgatatcggacaggtgctggagaatgtggtgtgccatcatttgctggtgtgcggatacgcgctgtatataggcagagatggcgataaggaagttgattttgtagccgaacgtaatggggaaaagctatatgttcaggttgcatattcagttatagaccccaaaacgcatgaacgggagtttggcaatctgttggcgattcaggataactatcccaagatagttgttaccatggatgaagtggaaggagtttcctatcaaggcatcgagcaggtgcccgttcgtaagtttttgcttcgttggaagtaagggtgggtgcagtatttatgcagtctgtatcataagtcttaaaagataaattacaaaggagaagctaaaacaactagcttctccttttcccatcctattaatcatcctgaatgattatttgaaaacaatctccatgggtctacctatccaaacttgtggttgttctaaatgaaagatgcgggcgatagtggacgccacatcgtattgcatcatgcttacatcgtcaaaccggagtcctttcttaatattcttgccggatatgatgaaagcagtttccatttcttgcattgtttttccgccatgacctttatcgatacctccatggtcggaagttaatatgaaaatggtatcatccagcattcccgcgtcttttaccgcctgaacgatttggccgacatacacatccagttctttaagtttctcataatattctggtgtgtcgtgtccggcagtgtgtccggtgtggtcggggccgtcgtagcagatggcaacaagagcggggtgtttctccttaatataagaagaagccatattgcccagttctttcggagtcttgttgcagtcggcaacatgatagtgataacttaaagacagcgtatctactaaatatttaattccttcccattcatacaggcagccgatttccgcttccgggcgggcatcgcgcagtaattggaaaacagtagggaagataccattcttatttaatacacgtgagggaagttccggtgttttagatccccattcggtgtatccgtgaagttccggtcccgctcccatgaacatggatgcccagttgatggcactggaagaggggagggcagaacgctttttcagtgtgtaagctccgtcctccatcagtttctttacgttcggcatatctgctttgggaaggctgtaggctccccagccgtccaaaccgatgaaaacaacatgtttagctttgtcttttcctttggcatggcaggagaaagtgaaactgaagaggagtgcgaatgtagcaagtagtgttaaaaaggtttgtttattcatgatattgttatttatagggttaatgttttattcgttatctaatcaaagggcataactaatgatgagcaaaggtaggattattttgagggggagacaaatataatattagcagatactaatacttttatggtatttcttttgaatttctgtcttttgcctggcattgattctttggttgtcaaattctatccttgattatttgtctataatattgaccgttttaatgattattctgctcaaatatgaatatcctttcagcttgactgcgataatatccttacagttttataataaaccgtttgagtgtttttaataaatagttgaagggtttattataaacggtatccaagtttattaaaaactatttttgggaaatttctgagtaaccttggaattatataaacaaaaagggagaaaatcagtgctgattctctcccttttccattcctttatagatggaaacagatgccttattggctgctgttatgtcttatattttatacgtttcatattgcttttcttctttttgctaccttcaaagatacaaaataaaaaaggaaaagtcaagagctggctgtgataaaacagtttccggtgtgaatggacaatagtttccagtgcgactggaaactattataagacgctgattctcacttattctttatgataagaatgatctttcggaaactcttctccttcccatgcttttttcgaagtccaggattgtgaatcatccgtccagaagggatcatcagtagacagacctaacgggaggaaagcaagcgatgccatatacaagctgccgttattagtgtaataatcggaaataccgggctgggaaccgttgaatcccagtgtcagaaaacctgctgtattgaagttgcggccgtccccgaacatacgttggatgacagccgtcatggctgtgcggacctgtccgtttgataattcttcgggaagccagttgcgccacgcaagcagggctaatgtctgcaaagacccggtacggtaagtgatagaacgtccgaaaacaggcagcgtaccttccggagagatgaggcgttcgaggattactccgaatcgttgggcacgtctgatcgcttcatggaagttgcagccgggcatatttcctatcttctcacgtttgccggcttcggtgattacctccagtgcttctatatacataggatgtatgacgaaactattgtaatagtcgaatgcgaaacgagggccgtccgaataccagccgtcacctacgtaccattcttctatcttgcgcagagaggaactgatgcggtaagtgtcactgggcgcgccagctttccgaaggaaggattctacggtggcgctgaacaacagccagttgctataggaaggatcgacccgtctgagatccgtaaattcggcgatataccgctgcttggtgatactgtccaatggcatccataaggcatcataacttctcaggaaactttctgccaggaaggcggcatccaccaaggtctgattctcctgacgccataacagataatcgggggaagcgggatctaccgcgttagcatagcttttcaatgcccattcccgcagttgtttgcgttggagtccttccggagtttcatcatcgggcaatgacagccacggtgccagtcccgccatcagacgcccgaagcattccatataagtgacgttcttgtcgcgtccgtcccatgtcggacttaattctacgagcatattctgtttcagcaggccttcgctcatattgctcaatacaggagcagccatccggtacattacgtcgcaccagatttctctgtcgcttttctctgttttctttttggcgctgatactttctgtcgggatcagcagaatcattaatagtaagatccaatgaagtcttttcatgtattgccttatttttaagattaaatcttcagctaaggagccatagccgaagcgtatggcaaaggtagaattattccgatagcagggcaaatacaatcttagcattaactaatacttttgcgttatttatccgatactgatactttcttatacaaaatgtccagtaaataatgcttgtcatcggaattgttatacatttgtccggtaaacaaaattattactatgagaaggaattggataggtagcagcatgatagttgcactctttgctttattggcaggcggatgcggtcatagtcaacgaacgctggagtttcgtggaatctgtgtagatgacccgcagggagaaaatggattatacaacccgggaagaggattccggttggaaactgcggtggatgtgctgtacgaaaaggacactcctaccaaagaactgaatgaattgtctgctaagtatatagcagatagtgtttcactctcacagagctacttttatctgacttatttaatagataaagaactgtctgaagaaaacttccggaccatgcaggcatattttgatgaactgcaaaagcaaggaaaaaaggccgtattgcgctttgcctacgaacgcgattttatgggacggtcgcctgtcggtcctaccggcgaacagatactggcgcacttggatcaattaaaacctttcctggagaaaaataaagatctgattctagtcgtacaagccggaatgattggtgcgtggggcgaatggcacagttcggttcagggactggaaaactcgaaagaaacaaaagctgccgtattggaaaaactgctttctgtggttcctgcggggagaaatgtacaagtcagactcccggaatttaagaatctgctgaaagataaaccggaactgtataagagactttctttccatgatgacttcattgtcatacgccccgacagatgggatgccgatatgcacgaagggacaccgaagtttgatcagatagtggcggaatctccttacctcgtggtagacggtgaactgccctggggattctggagtgtgggcgctgatccggacagtccttctgccggatggattattgacggtctgcaagtggcaagacgtttattcctccagcattatacttcactaagcatcatacataactataaggagcaacatcccaacaagcggttcgacgagaataatccgcccgaatactctatggtggtctggaagaaaacgatgataacggaagactccctcctccagcatcacatgccggtgtccgacagctacttccggaagaaagacggaacgaaggtaaaacgcaatgtgttcgattatatacgcgatcatctgggttaccggattgagctgcaatcacttcagcttccttccaaattcgtgagtggaaaggagaacgtcttgaaactgagcttgaagaacagaggttttgccaccgtatttggtgagcatcctgtttatttcgtattgattgatgatgcaggagaggttacggaatttccggccgatgccaatccaaagaactggcaaccgttcgaaccaaaggattctacctatacttcgctgacgcatacagtggatgtatctcttgaacttcccgcctcgctgactgccggaacttataagttaggtctgtggataccggacggatcggagagactcagatataatcctcgttatgccatccattgtgccaatggggatacggactggtggatttctaaggatggaaagtatggcgtgaatgtattgactgcggttgaagtggaataaatgatttgttactatgataaaagtgaaaggcttcgggtatgattaccggaagccttttattgttgggtatggattactttattaagaattataaatcagtaccaccgtatacgccacatagcaaagtatcataatgcttccttctatccgcgtaatggtccgcttggcaaagaacagcccgaacagccagagcagaatgctggaacctaccagtgtaaacaggtcgaagtttgtaattccgctaagatggaggggagtgatactggcgctgcatcccaatacaaagaagatattgaagagattactgccgattacatttccgatagccatttccggattctttttcagtgcggcgacgatggaagtggcaagctccggcagggaagttcctccggctaccagcgttaatccgataatggattcgctgactcccatgctgcgggcgatccctgtagctccgttgacgaacagctgacctccatagatgagtgccgccagtccgccaatgatatagagaatggatttccaccacgaaagcagcttgatctcttcttccggtgccgtgtgctccggtgctgccggttccggtgcagcggaagattttgggaaagcgatggcaaacgtataccccatgaaaatggcgaagaagcagagtaaaagcagaccgtctactctgttcagtatattttctgtggcattatcgaggaatatgtcattggcgcatatcagcaacaccacagacgagaggatacagagcggtatctcttttcgtaaggtattccgggtgatgacaatcggagcgaacagtgccgtacatcccacgatcatcagcgtattgaatatgttacttcccactacattacctatggcaatgtccgcgcttcctttcagggcggaagcgacactcaccgtcagttccggagcggacgtgccgaaggcgacaatggtcagtccgataacgatggaaggtatgcggaaacgtttggctacggaagcggcaccgtctgtcagtccgttagctcctagtaaaatgagaattaatcctccgataagtaatagtatattcataatctgcattattttcggcatagtcatcctctgccggatattcggtgcaaagatatgtttttcttcttactctttaaacaggagagattgaactttaccggaagaacccggttttaatttagttttttatttgccccctcttggaaatcaagaggaggggacgggcaaatagttgattaaggcagtggcatttatctattcgggcagatgaatccgaaccgcttgtccgtttcttacagtctgtttatatagctgcttgcggtttccggaaactttgatttcaatcttatcctgtttgattcgtttcacttcgatatcgaatgctgttctgaaggcacatacatttcgcaggttcatcgtgttccagtcctggggcagatgaggcgtcaatgtaaacgaatggagtccggtagggcgaatgccgaacagtccttcggtgatgatacgtccatatagtccgctttctgccgatagatggcgctgatttccttccggccaggcttcgatagcatacggaacgtgttcacccaacagacgctggccggaataaaactttaaatattcggtcgctttgtccgtttccccgcaggcgtatacgccccgcagtgcatataaagtagaacggtcccagaatgtttggcttcccgactcggtcagtaatccgtcctgagtccataggcggggtgaaaacaaagccttgatcgtttcgtccttgcggtcgaagatgcccactgtgagcggaatgcagatccatgaacgcagtttgtcattctccttataatatcggtaagtgttgaatccttccacctctccgccaaagtagcggtcgatattcttcctcagttcttctgcctgtttcttgtattgtgccagttgggtacggtttatacctgtctcccttcccagataacaggcggataagagtgcgtcgtagtataaggacgaagtgcacaggttcgcttttcctgccgggaaacgtccttccagctcatcggagtcggagcttaccactccgtccgcatttagttgccgtctgttatattcgaggcaccattcgataagaggccaaagttgcttcgcttcttcccggtctccttgtgccagggcatatcgggcggctccgtaggctaccattgcagcgtcgccgcgatcgccggctccaccccagacatccgtaccttctgcaatgatcgaactggggagctttttatactccggattaataaaacgggcaaaatgcatgaacgaacacaaggcagactgattgccggtctgataaccaaggtagggaaagaaaggattgacgtactcagcctgatcattggcccagatcgctgcatagtaggcttcaccgcccggtccgtgcaataatccgcctttcgtttcgtatatactttcggcagcacggattttggcaaaggcgaacatggtattaattgtacgatccggtgtttccagtatcagattgtcccatagacctgcaatcaatgcttcgcgtgcttctttttcctggtcgatgtccatcgccggttcagcctcatcgggcttgtatccggcaaagaaggcactgaaggagacttcctcacccggctttaatatcaccgtctttcctcccttgatttccgataccagcctgtaacttccatatactccctgttcgggcaatgtctgtatgacagaacgggactgagggatctctacccggatgttgtggctgttgtcattgcgcagcacatacttctcgcagaaagcaggcttattggttgaagggaataagatacgtgtcagtgccacttttcctccgtttccatgataggtgctgttcaccgtgatgcttcctttcagggtgatgctctctactttttcgttccgcagacattgaccgttgaccgttatcatttcaggtatgttccaggagaatcttctcataagagaggcgtgtgtattattgggaacggtacgcagcatcggccatatcatgcttctgtctagggtaaaggcgcctttttcgtcgactccataccgtatgacggcggatattttcagaccactcatttcgatatgatcctgatgggcatccttctctctgagtttccatgtaatgcttccatccgggttgatgttccagcggttctctgcctgtatctcagagaggctcaggcagagaaagcataagaggatgatatacaaattctttttcatgggtatcgtctgtataatggatattttcttagtgtttgaaaccggatagtatttttttatactctttctcgctgatgcggaccattgctccgtggcgtgaatccggaatcgtcagatcggtgcaatcccacttctcggcgtccatatggtctgcctgaaagcggacatactcatgcggatatttttcagagaagatcatccatccgttattgtccggttgaggcatcaggataggagcttcatagtaagtgtagggagtagtcaccggctgaccgggatcggtatacggtccggtcaggtttggggaatgggagattctgacagttttgcctgtcggtactccgtcttccggccatctttcgtctttgatgacggcataataagtaccgtttatttttcggatgatggcatcgattgtcgccatttcccggtccgcttcggtctggaagtcaaacaagcgttcgggggtagtgaaatgctcaaagtccttcgtcagtatataaaaggttctcatgctagtccattcttctttgccggtggctcctgctttgcaggcgtgccaggtgatcagatactgatctgaatccttgtcatagaagagtttgggggcaccaaaccaggcgcgttcggtaaagtagccttcgatatggatgaagggttcggcggataactccttttcctgtttccattttactaagtctctggaagtccagaggacagggttttgtgtcttttcagagacgccgatcatatagtagcgtccgtctctgcctttcatgatgtcgggatgtcccctgtagtccggaaccacccgttcgttgttgttcagcttggtccagtttttggcatccctgctgatgtagtaatatagacgtccgtaatcctcatgtctcatgtgtgcgaaaagataccctccgtttccggctttgacgctggggctggttaatacaaaacacacaaataagagtttcagtagtaaatgttttctcatgataataataagttgattagttagtagcttttgataaatcttcactccatccgggacgtgaataagtttgttgcaggtcttttccgtaagactttgcctgttctacaaaatagttgggcagcggtacatactggtgtgtaggtgatacgccttttactttccggcatagctgggcatacttgttgaaccggatcagatcgattttcctctgtccttcgtacaggaactctttcgccctttcctccagaatcgcatcgaggaaggcttctttagagcttgtctgccgggcggacaggttatccagtcccgctctgttcctcacttcattgacggcactgacagcctccgcagaaggggccgcattggatttgcgcacttccgcttccgccatcatcagtaaaacatccgcccagcgtgccagtgggaaatcgtttccctgaaagaccgtgtttgtctctatcgggaatttattgataatgtatccgtcccatctgactcccaggtcttctttggttcttttcgtggtcactcctcccgtgccgttatctacccaatactcatttaaaatgacggctcttcgtttgtctctggagtcgtaactgtcatacagcttgggagatacattgtagaattgtgcccacccttttccctgatagtagaatggggtaggatgtccgtctatatctactttggaggcatcattcggagtggtcagcatggacagcgggaagaagttgccgctgctgtctcctccgtcggcagacggatcgcagcttaaagccatgataatctcgcaattaaagtcgtttttggctttgtacatatccacatacggattgtccccttctttaaagaggctgtaacgatgggtagcctccagctcctgatacatttccagtgctttctgatagtaatgcggcatatgctctccttcgttgaggcaatgtttcatcaggcagaatctggcataatccgatgtatagcgtcctctttcttctactgtttccgggagattctctattgcaaattcaaagtcgttgtaaatccatgacgtcatttcttccagtgaaggtctgaccagattattcagtgcttcctcgttggtaacgtcctctccctgtgtgatgacgggcagcggaccgtaaatatgcatcagataatagatcatcagacctctgcataaatgaacttcgcccagcagttgctttttgctgatggtgtggaagatgctttcatccgctttttccaatgtggagataatctccgtgaatctggtgatctgtcccagtttgggtatgtggttgatgttatcttcgctcacccaggaacgttcatagtaagtacaattgttgaagtcggcctgtgagaatttcagccactctccccagcccgtgccccagacagccatattgtccgaaggagactcaaacattctgagaatgccgccttccggtatataaaagccatgttgtctcagttctgtaccgatgtagtaagtccacgttgtggtgaacggcaagtaacacgccagggcatagtctttatattccgtctctgtcgaagggaagttgtcgggatttaaagttccgaatatcttgggatcgaaattatcctcacaactacataatactaacaggcttgttgcaataaacagtcttatcaatcttatttttttcatttctgcaaatcttcttaggttcatttaaaaagtaatattagctccgagagagaaggtacgtgtctgaggatattcacctctggaacctccgccggctccgcctcctccggtatatatctccggatcgaatccttgaaacttggtcagtataaaaggattctgggcatccacgtacactttgatattccgtacatatctttgcagagaaccgagtaggtttccggtcaggttataagccagcgtgatatttctcattctcatgaatgatgcgttttccatatctgtattcacccatgcattgcccggcaatgctcccattttgccaatggccagaccgggacggcttccgttgggatttgtctgcgagttccagaggcgataggcaaacttgtttgaattctccggatagtcgactgccagtggaccggcttgtgcggcactgtaggcgatattatacttctgtatgccgaactgcccgtacataaaaaaactgaattcaaagttcttgtaagtaaatgtattgccgaagccgacataaacagccggagaattatctttcatgtagatatcgttttcatctatcttaccgtccttgtttttgtcctcgataatcggacagccgggcagctgggcctctgcctgtaatgacttctgtgattccggcatattggaacggtcggtgttgatgatgtcggtcacattgtaatagtaataggcgttcatcggctcattttctctcttctgataaatctggtagtcatagttgggcagcctttccttccagaatgaatttgttttggagaaagtaagcgaggtgtcccatgtaaattctccgacgatgtttttggtatccagcatcagttcccatcctcttctgtagtaatggcctccgttgaccggtctggtttcgtagatggccagaggcgaggttgaagcatatcccagcaggcgggtaatgtcatttctgaaaaagtcgaagctgccggaaatgcggtcgctcagcagatagaagtccagaccgatattcttcatcgttgttttttgccagcttacatccgggtaattggctcccatagacacataagggatgttgataatactgttatcactgaaattaaccttgaaattgttgggtgcatacgatccgtagagagaactgcccaggttatcctgtcctgtctttccccagcttgctctgagcttcagcaggttaatccacgaaatgctcttcagaaagttctcattcgaaatcttccaagcccccgatacggatggaaacaaggcatacttattccccggaaaaaacttgtccgtgccatcccgtcgcagtgtagcggtgatcacatacttgtccagtatgtcaaagcccgctttaaagaactgcgatctcttttcattctttgcggtgtgcgatgtcggataaaacttgccctttgcggaactgatgtcgtgttcgttgatggcatcgtgtacatcttcataggaaatgccgtatccttcgtaactttccagatacttgccgatacctgccaaggcatctatctgcacggtattgaacatatacttggagaacgtcagcatggcttccagcgtctgtgtcagccttctttccgattgtatattccctcttgacttgtacattctggagaaataaacatccgaaggtataaagatcgaacgtctcatgctttcctgattcattccgtatactcctttgacggaaagaatatccttgtacagtttcagatgggcggtgaagttcagattatatccgttttctttcgtcttgtcggcgatgtcctccattgctttgggattgggaatgctccgaaagatggtataggtgccgtcatcctgtgtcagaggcaggtaaggcggatataaaagggctgaagtcagcgcactgcccgctacatctccccggttgcctgtatcggtgcctaccatacagttgctgtaggtattttgattggcattgaaagcggaggtgaagttcagaaaaggaaaaagatcgactccgatgtttccgcgaaaggtatatttggtcatgccggaattgagcacggttccttcctgatccagatagcttcctcccagataatatctgatcttggaggttcctccgctgattgtcagattatgcttggtgatgtagccgcttttcagcacgtagtctttccagttggtgtcgagtgcgttcagacgatctgtttctgagaatagcggactccatttcccgtcatatgcatccgggccataggggtattgtttcttgttgtacaagtagttctctttgttgaatacattggcaagttccatgtattgctgtgagttgagcgcatccagatacgggtaatttctcacaaaagagtaactgccgtcatagctgatgctgggagcgccttcttttcctttcttggtggtgattaaaatgactccgttggctgcaccgataccataaatggcggctgaggcatctttcagtatttctacggactcgatatcggaagggttcagaccggcgagtccgccgcggttgacattgctcggcagacctgtttctccaccattcgtgctgatggcatcgcccggcatcacgatgccgtctactacatagatcgggttttctccgccgcgaatggatatatttaccttgccgtccggctgggtactgttgaccactgcctgtaatccggcggcacggcccatcaataactggctgatattactcgttgccgcttgtggaatcttttccggtttcacctgggcaatggcagtcgtcagattctttctggatacggcaccatatcctaccaccactacttcgtcgatcactttcgtgtcctccgacatccatatctccaataggctgttcgcctttaccggaaccagttgtgtgacatagcccatataagaaacgcaaagcctcgaatgctccggagcctcaatttcgaaacgaccgtcgatatcgctgatagcgccggtcttttctccttccaccgtaatgcttgccccgataatcggttcacgggttttactgtccatgacgatgccttttgacttttccggtgcctttttcgtttccttctttctggcattcaggatgatttgctttcccttgatgtgatactggatgtccgtgcccttcagaagtatgtttaataccgcttctatcggctggttctttacgtgaatcgaacgtttttgccggacgtcgatcacctgcgtgctatactgaaaagaatagctggtcttcttttctattttattcagaatctcattcagaggcgtatcagacacgctgagtgtcaaggtgctgttctgtgccgatacgggattcggatataaaacagccatcagaaaacttaatagtaagaatgtaattctcttcataatcagaattgtttttttagtattgatacaggaatgcacttaagtgatttgtatataagactgctcagaaagaaaataccacatgggaaaatgaaaaaaaacagatagcggagagaaaaaagagaatgcggagagaacaaagcgtatacatggtctttgtcctctccgcagcgttttatatcagaaacgtctaattcttatatacttctatcgtgcggacgcttacactgtcattcccttcttgttttgtttctgttgtccggaaagtgatggggatgctcattcccatataatccagtatttcatccagcgtctcacctttgaaagtcgctcggtaagtgaactggctgatcgacgggtctttcaggatgaaacgtacctggtagacttgttccagcctgtcgaatattgtttcgagcggatcgtccctgaatgcgaggataccgtctttccaggagatgtattggtacgtgtcgatatccgtgacctccatgcttttcgatgctttctgataattcagctgttgtcccggcaatagatgccggatgttattctcatgagacacattgacttttccggtcaccaacgtgataacttcctctttcgctttggcgaagctgcatacattgaaagtggttccggtagccgttaccttcaggtttcccgtactgacgatgaaaggatgctccttgtccgcatgcacctcaaagtaggcttctccggacatttccacttcccggatgttgctggtgaaagcggtcggatatttcagcgtacttcctgcgttcagccaaaccttcgagctgtccggcagtgtcagcgtggataccgttccgtatggagccgtcacttcgttgaaggcgataaggggagcctgatagtcttttttcatcaacaatgccactacggcaatgattgccggcagcaggagaatggcggcgattctccggcagtaagtgatcagtcgtgttctcttcaccggagcctgtggcgttgtatggattctgttctttacttttgccagggctttgccggtatctatcttttctggatcgacggcgggagtggtcacttcccagatgtttctgatttcctgaaagtagtttgcattctcttccgagagggcaatccattcacggagttgccggatttcttcgggtgaagcggtcttttccaagtatcttaggatgacgtctgtatctatatttatatttttgtcaggcatagtgctaattatctgtattataatgactgttcaagtgtaaattacctcattaaatttatgataaaaagtaatatcagatcataaaaaccgctcaggtgttttcttagaaattccagcgacttactgattttactttccacggtgcggacggatacgttcagttcttccgctatttcccggtatttcaggtttttgaaccggttcatttcgaagatggtccgcatatcttcgggaagttttttgatggcttcctgcaaatggtcgttcagatcggaatacagcagataatgttctgtattatagtctatcaggtctgagcttcccatgacatagttctgatgggtacggactacttcccgatgtctgagttcttcgaaacaactgtttttgacagcagtcagcagataggctttcagagaactttcaatgctcaggttctcacggttttcccatagccggaagaagatatcctgcacaatatcttcactgctgttctgttctttcaggaaaacgcagctaaagaggacaaggtctttataatacttgttgaaaagaaaatcaaaagaccgggaatcaccttctttcagtcttttcaggtggataatatcctctagcatggactcttgtttgtttgaggctttattttccataatgattcggtaacattaataatgcgtttgcagttctccaatccggagaatcaaaatatcagatcaataggcgctgcaaagatatagattaatttgaatttcttcctctctttgttttttttgtttttcccgtgtggtatttccgttctgaacagtcttattaacgttgttgagatttctaatttaaatgaatagatactatgaatgagtacggtaaactaaaaactctttccttattattggtggctttgttctgtatacctttggcagcatcgggtcagggtacgaacattgcttatcaggacggtcaggtccgttttacggtggtgaccgacggtacactccggttggagtatgcacccgacgggcagtttgttgacgatttttcgtttgtggctgtcaacaggaagtatccggcagtggattataagttgaagaaggatggaagatgggtggagctgtctacctcaaagttccggatgaagtacaagaaaggcagcgggcggtttacttcgggtaatctttccattgtatctgccaaaggtgtgcatcctttccggtggacgcccggtatgaaacagaaaggcaatctgaagggaacctatcgtaccttggatggctatgatggagacaggcatatacataccaatgagcttatgccgctcgaagacggtctgctggctaccgacggctggactttaatcgacgattcggataactttttattcgatgatgccgactggaactgggtaaaaccacgcgagaagaaaggaagtcaggactggtattttatggcttacggacacgattataagttggcattaagggactataccatgtttgccggcaagacgcctctgcctccccgttatgctttcggttattggtggtcgcgctattggagttactcggacaatgaactgagagaactgctgcgtaaattccggatgtatgatattcctctcgatgtgttggtgattgatatggactggcattatacggaaccgggtaaaggaggatggagcggatggacctggaacaaacgcctgtttcctgatcccggacgtcttcttgctgatctgaaaaaggaaggggtcaagctgacccttaatttgcatccggctgacgggtttgctttttatgaggaaccctatcgggcgatagccgccgatataggcatgaatccggaaggaaaggatacgatcccttgggtaacttcggataagaagttgatgaaagctgtgttcaaaaatgctcttcatccgatggagaaggaaggggtagacttctggtggctcgactggcagcagtttccgtatgataagaaagtggacagtctgaataatgtatggtggattaattatgtctttttcaccgagatggaaagaaaccgcactacccgtccgatgctctatcatcgttggggcggactgggaaatcatcgttaccagatcggcttttcgggcgacgctgttatttcctggaaatcacttgatttccagccttacttcaattctacagcttccaatgtgctttacggttattggagccatgacctgggaggacactttgaggcagaccggattgatccggagatgttcacacgctggatgcagtttggtgcggtcagccctgtgatgcgtactcattcttccaagagcggagtgttgaacaaagaaccctgggtattcagtcctgtctactttaatacgattcgtaacaccattttgcaacgttatgagatggcgccttatgtttatacaatggcccgtaagacgtatgatgagggattgtctatctgtcgtccgctatattacgattatcctgaaagcaaggaagcatacgattaccggaaccagtatatgtttggcgaccagatgttgattgcacccgtcaccgctcccatgaaaggtgattattccactttgaatgtatggctgcctgccggaaccgactggtatgaatggcatacggggacgatgctgaaaggtggtcagacagtaacgcgtgcctttgccattgacgaatatcctatctatatcaaggctggttcgattcttcctttctgcgaccgtgtgaagtcgctggcggatgatgatctttcttatgtggtcattgttttccccggcggagacggggtattcgaactgtacgaggataatggaaatgataaagagtatgatagaaagtatgcccgtacgtctttgcagtcgaagcgcgtcggcaaccgcctggaagtgacgattggcagtcggaaaggagaatatccgggcgtacccgccgaacgtggtttcagggtgaaggtagtgagttctgccattcctcagtcggtaacggtgaatgggaagacggcggattatatatatgatggaaattccttatcccttctggtcgatatacccgtaacggatgcgaagtgtgagaagcaagtggtgattacctatcccgaacagacggcagacctgaacggacttgccggaaagttcaggagacttcagaagagcatcgttgcgctgaaatataaagatgccgatattgtgctcaatgaggaattgggtacgatggagtcaaccgggaggagtatcgaatatacaccggagcggataaaccggcttgttactgattttatccgaaattatggcaagctgccggaaattctgaagcaacataagctgagtgaagaaaacgtccggtggtttttggagtctgtacattgggaggattagtccaatgacggactacgggcattttgacaatttgtatttttaatcctcttggaatcctgtttttccatcttgagtcggaaggaaatgaaaataaacgattgaaaaaccgtattttattgattgatagtgaaatataagaatctatacaactctgatatatcggaactgtcgccttttcgttggatatgaacacttctttccttgattattgctatctgatctgttggctatagctacccaatctgttgggcatagttacccaacctgttggttatagttatctgacctgttggctatagttatccaacaggccagatagcttagatgacaagatacttatgactataaactgcatattctgtgtataaactgaaagtttcgactgaaatcattgtatattaatgcatgtcttcttgaggccgccatctctttgagggttttccaatcatgcaggtgttagtgatttctcaattattctttctttttgatcgcagaaacgcattatttccggaatggcattcgttgcatctctgtgtaggtgtttcttctcttagcagccattggttaacgtgtgttaatgtgatgtggggttttgttccaggctagtcttttatacgaatgagcataaaataaaatgagaaaacaatagaaccaacttttgatacagctctacttcttttttgcccttttacaaacttttgaaatgataagatgactttgtgctttatataattaactcttaaaagtaataaactatgaatgtgaaaaaagcattatttgcaagctcgctttttttgtgtggtgcaggtgtgttaccggtgacagccggtctgccggttccccatgatgaaagtgaaatctcttctcccatgccggagcagcaaaagaaaaaccggatcattaccggtaatgtcacggatggctctaccggagaaccgcttatcggtgtgtccatcatactgaaaggttcttctgagggtactacgaccgatctggacggtaacttcagcctttcggttcctgtcaaggcacagttggaattttcttatatcggttataaaaagcaagtattggatgtaacggacctggtggtagccaatgtgaaactggaatcggataatgaaatgctggcggaagtagtggtagtcggtgcgggtacacagaaaaaggtatccgtgaccggtgccattacgtctgtgaagggaacggaactgcatgcgcccagctcttctctgaccagcaatttcgccggaaaactggccggtgtgatcgcagtgaccaccggtggcgaaccgggaacttcatccaacttctatattcgtggtatcggaaccttcggaggtcgcgccactccgttgattctgttggacggcgttgaaatatcttcgggcgacttgaaccgtattccccccgaatccatcgaaagtttctctatcctgaaagatgcgtcggctacggctatctacggtgcccgtggtgcgaatggcgtgatgctggtcactaccaagatcggtactgaaaacaccaaggcatcgatcaacgtgacggtagaaaactcatttctgaaacctgtcaacgaagtaggttatgtggatggtgcccggtggatggaaatctataacgaggcccagttggcaagaacgcccaatgcgacgccgaagtacagtcaggagagaatcgattatacccgcagcggcatcaatccgtatgtctatccggatgtggactggtacgaccttgtctttaaggagagcaccatgaaccagcgtgcgaatgtcaatatcatgggtggcggaccgaaggtcagctattacatgagtttgcaggctaaccacgatacggggttgctggatattcccaaggcttactcattcgacaataacatcaacaagtggggatatactttccagaacaatatcgcctataaggtgacgcccactacacgtatagacctgagaatgaatgcacagatcggaaacaataaagggccgaacgcttcagtgtcggacatcttctatcaggtttacaacaataatccggtcacttttccggcttactttccggcggaacccgatgacaggcacattaagtatggtaatgctatattgagcggtacttccctgtataccaacccttaccaatatatgctgggaagctataaggaagtaaattacagcatgctgaatacttccatttacattaatcagaaccttgatttcgtaacgaaaggactgaaaattatcgcattggtgaactggaagtcgtggtccgaaacgtcgtatacccgttggctcgatccgtactggtatcgggtagaccccaaaagctggtcgcctgataatccgggagaatatacgctggaacgtctgaacagcagcggcagtgaatatatctcgcagtcgggcatcggtcgcggagccgataatacgttctactttcacggacaactgaactatgaaaacacattcggcgaagatcatggagtaacggccatgttgatgtatatgcagcgtgaatatcggaatgatgtgctgcccaaccgtaatcagggactttccggacgtcttacctatgctttccggcagaaatacctggcggagtttaacttcggttacaatggtacggaacgtctcgacaaaggaaaacgttttgaattcttccccgccatgtctttgggatgggtagtcagcagtgaaaagttttggcagccgctcgaaaagtatgtcgattacttcaaggtcagaggttcatacggtttggtcggtagtgatgaaaccggttcatacgatggcgccgcccactttttatatgtcaataatgtaaacctgggtggtggcggaagctattctaccggccctacctatagcagcatatataaaaaaggaccgagcatcaattcgtatgccgttcagaatgcgcactgggaacgagtgaaaaagatggatatcggtgtggatatgaagctgttcaatcaggtggacatcacattcgattatttctgtgataagcgcgaccgtattttgatgcggcgtgcgtcatggcctgctctgctgggatatgtctcggctactccgtggagtaatatcggtaaggtagagaataagggtatcgagctgggcgtcaactggaagaaggaggtattcaaaggtttccatgttgacttccgcggcaacttcacttatacggaaaataaatacatcgacaaggatgaaccggcctatccgtatgtatggcagacggagaccggaaagccgctgagcaggacaacaggttacatcgccgagggactgttcagaagtcaggaagagattgacgacagtcctgcgcaggacggtatcggcagtgcgaaactgatgccgggtgatatcaaatatcgggatgtgaacggcgacggcaagattacggaagatgataaagtgatgatctctccctatggaacgatgccacgtatccagtacggtctgggactgaatctctcttacaagggctttgatttcggtgtgttctttaacggatcagccaaacgtactttgatgctgaacggagtagacccgttcggttcggacgaaggacacggcgaccgtaacctgatgaactttattgcagacaactattggagtgaaagcgaacagaactgggatgccgaatatccgcgtctgggtctgaccaaggttcaggtggctaataatatggtccccagtacgtattggatgcggaatggcaacttcattcgtttcaagacactggaaatcggttattcgttcccgcattgccgcgtttttgtcagtggcgacaacctggcggtatggagtccgttcaagttctgggacccggaactctcttacaattcttatccgttacagcgtacggttaatatcggcgcaaaatttagtttttaacctttaatgaactcaactattatgaaacgaatatcgaaaatagctcgctatgcaaagacgatactgcctctttgctgtctggcatcctgcagttacctggacgtagtgccgcccgaaacagaagacatcaaggatatgatgaaaaatgaagatgctaccttgtctttcgtgtattcttgctataactccctgcaatggggatacaccgacccgatagactatcgtacctacgagtcttctaccgatgaatttgtggttcctactctttggaatcgtgccggccagatagcttcgtggaatcagttgtcatcgcaatataaacccaactgggatacgaagtatgcctggcagatactttatgacgcaatagggcattgcaatctgtttctggacttgctggtgaaactcaatcctgatatcgcaccggaaaagaagctgcggtttgccgccgaagtgaagtgtgtaaaggcgtactattattcacgcctgctggaacgtttcggtcctgtgcctatcatagacacctatccggaaatgaatatgccggcatccagtttccccggacgctcgcactatgactattgcgtagactatgtagtccgcctgctggaagaagcagaggcagacctgccggctgtcgtggcggacgatgatctgggacgtgccacttctaccatctgcaaggcgttgaaagcgcgtgtgcttctcactgccgcttctcctctgtggaacggttctttcccctacaagaactggaagaacaccaattatgaaactccggggtatggaaaagaactggtaagcaatcagtatagcgcacagaagtgggaacgggcgctgacggcctgcgaagaggctttgactcttgctttgggagacggcaagcgcgaactgctcgacattgcgcagtcggagaatatccgtacaggcgaaagtgtgcctttgcctgtcattccgggactggatacaagcacgcccgaaggacaggaatttcagaaacgggtggtactgatgcgttatgtgctgactgctattgaaacagtcggaaataaggaacgtgtctggggagccggatttgcacaggaaaatctggatgcctctatgccccacaacctggtatatgccaacggcaactggaccagtatgtatggaggtatcgctccgacgctcaatacgatggagagtttctacaccgccaacggagtattgccggacaacgacaagaactttcctgccaaagacgatcggctaaactcggccggattgtcttccaacagtaatatcattaagctgaacgtcaatcgtgaaccacgctattatgcctggctgtcttttgacggtgatgaatacagctctttgattactgacggaaacccgatgttcctcgatatgcgtagcagcgataagcagggctataatccggataagtttaaccgtgataacagtgcgacgggctttttgtcgaagaagttcgtatttccctctgtccgcttccgttccaacgatggctggtatgacaagaaacaattcccgtttcctattatccgtttgtccgaactttatctgaatctggcggaatgttatgcttacctcgcagagaaagaagggcatgccgactatgtggagaaagcactggacaagttgaacgacattcgccgcagagccggaatccgtgaactggtgaaagctgatattgcaggcagcatgactttactgaaatgggtggaaagcgaacgcttcatcgaactgtggggagaaggacaccgctatcgtgatgcccgccgctggatgaccgcccccgattactttaaggccggagtacgtgaaggactgaacgctattcagaagaaggaccccagtttcagggaattcaaccagcgtgtgaagatcgaccagcctttccaatgggcgaaccgtatgtatctgatgcctatccctgcaagtgaagtgtacgccaatccgcaattggaacagtcgcccgaatattaatccgattaaaacaagcatatatgaaacagtttatatataaatcgctgatactgggaagtgccttgatagctgcttcctgtagtaactcggcatacgaattcgatcaattatttccgcaggaataccacaagattctatacgtgaaatacaacggcaagcaggaaatgaatatgaatacggtggagacgactcccgtatacagcatcaatgtgattaaagcaggaagcgacccttctctgaccgctcatgtgaaactgtcggtgatgactcagcaggaagtggacgcctcatacgggctgctcgacaacattgactaccgggttgttccttccaatacatactcgatggctgcaacggaactcgacttccagtcgcaggaggtgtcgaagaagctggatattgtttttcattccgacctgatttatgagctgatgcaaaaggacaaagacgtgaagtacgtgcttcctgtccggttttcgagtgaacgggattctgtcaacagttcgaagaatgatgtaatgcttttgctggatgtgaagaagccggtaattacattcaaagcgggtgaagtgaatgccgcgatggtgtacaagcagctggaagtgaacgttggcgctaatctgaaaaacattcaggccagcaagtggaactttacctgtgatatgacggatgcgcagaaagacgctttggtcgaagcctataacaccgaacatggaacgagctatctcccgatgccttctgcggcttaccagctcgaaaagatgacgtttgaagagggagcgagcaccggaaacctgaagatgaatatttccagaactccgttgacgaatgacaagtcttatttgttgccgttgaaaatctccgacacctcacaggaagggtttgatctggacgagaatgtctgtttcctgaaagtggagaatcctaaatacggaacactggattgtgatcgcagcaaatgggaagtcgttttctgtaacagtgacgagaagaacgccgtgtcggaacctaacggagacaagggcggtgtgggctgtctttttgatgatgacattaattcgtactggcatgccaattggagtgggggaacgaataatgacgatcagtttcctcaacttttccagggagggagagagatgcccatcacgattgtagtggatatgaaagaaccaatcatcgttcatagtatcggttggacccagcgtcagaattcagactatcaggatacgaagaaggtggaatattatgtgtccgatgacgaacagttcaaactgggcggtaaggaagactattcacctgtggcactgaataactggacgtttgtcatggaacgctcgtatcagaaaggctacaatgccactcaatggcagacacagtctgaagaagtgctgcagaagaaagtgaaagggcatttgctgaaagtgaaaatagtagaaggttatcgggaccggttggccagcggagccgaattgtacgtaaagcaactgcttgcggttgatggcgagccaatccaataattcgaggagatgaacaaaggtcagatgaggtaaaaaagagaatgttcgaaggatgagagagtgggcagtagggacttctgtcagcagtcaggtactcctgtgctgctggcaggaagttccggtctgccactaataagagaatctgtttattcaaaataggaatgatataattatgagaaaatttatttgtttgtttgtgatctgttttctgtccatagcgacaacattgcgtgcgtgggaggggaatgtactggtttccaccccgaatacttccatcatattaagtgctacggaagggcaacagcttcgtttctcctacttcggggagagagtggaagaagatcagattcaccaggtctttgatgcgtggactggttttcaccgtccggcatatccggtgttcggtacttccacttatgaaatctccgcccttcatgcggttcatgctgatggcaatcagacgctggatttaattgtcgaccgggtagaacagaatccggtgaaggatgccgtactgactaccattaccatgaaagaccggatatatcctttcactgtcaaaatgtactataaggcttatcagcatatagatatgatagagacatgggtggaagtatcgcataaagagaagaaggccgtagtgctgaaacggtttgactccggccattttctgattcgtcgcggagatgtgtggatatcgtccttgcatggacattggggagcggagtcgcaattggaaagtgaaccgctggtgtcgggaatgaaagtgatgaagaacatggacggtatccgtaacggactcggtgaccattcggaagtcatgttctctttggatggtaaaccgcaggagaatagcggacgggtcatcggggcggcactttgctggagcggccgtaccaagatcagagtggatatggatgatacattcggcagattcgtgcacagcgtctttgccggaatgaatgaagaagcctccgagtatagactggaaccgggggaagtattcgctactccggtgcttgcgctgacttattcgcaggaaggcgtcggcggtgccagccgtaattttcaccggtgggcacgtgcaggcatggttcatggttgtgacaagccgcgggatatcctgctcaatagctgggaaggcgtatatctgaatatcaaagaacctgagatggatcagatgatgaatgatattgcctctatgggaggtgagctttttgtgatggacgatggctggtttggcgggaaatatcgccggattaatgataactcttcgttgggcgactgggtggtagatacggaaaagctgcctcatggcattaaaggactgactgatgcggccgggaaatatggaattaaattcggtatatggatcgaaccggagtttaccaatacaaagagtgaactgattgacaatcatcccgactgggtgctgcgtgccggaagccgtgacctgtcatgcggtcgtggcggtacacaggtggcgctcgatttatgtaatccgaaagtacaggattttgtctttcatgtagtcgatacgctattggcaaactatccggatattgcctatatcaagtgggacgcaaacggtgaattgctgaactacggttcttcttatctgccgaaggataagcaatcgcatatctatatagattatcaccgtggtctggtcagagtgatggaacggattcgggctaaatatccggatgtagtgattcaagcctgcggaagcggtggcggacgtgtcagctatggagtaatgccttatttcgatgagttttgggttagtgacaataccgatgccctgcaacgtctgtttatccagtgggggacctcttatttctatccttccattgcgatggcgcaacatgtcagtgcttccccgaatcatcagacagggcgtgtagtgccgcttaaattccgctttgatgtagctatgaccggtcgtctgggtatggagattcagccgaaaaacatgaccgatgaggaaaaagaattctcgaagaaggcgatcgctgcctataagtcgatccgtcctgtgatacagtatggcgatctgtatcgtttgatttctccttacgaccgcaagggagtgacttcgctgatgtacaccacggaagataagagccgtgccgtattctttgtctataagatggaacaatttgtcaatcagattctgccacgtattcgtatggcagggctcgacccgaagaagaattataaaattcgtgagttgaacgtagctctgggtgccgctccctgtttcctgaatgatcgtgtattctcgggagctttgcttatgaatacaggtattgaggtacaactggaacgtgaatatgcaagttgggtacttgagctgaccgaggtttaaatacgcggaaaaatagtactttgggattatcttcccgagaaacggtatgagtccggacatcgcagtttggatttataccgttttttgaatggttatgtcaaaaacaatccgtatgtttgccatgtttattaaaaagtgaaattaaagttaattcacctaacttggaatcattctatatggatatgaaaaaaataaaacggtttgcattgctgctgatgatggtttcccttgcagtgaatgtacaggcgcaactggagcaggcagtcaagaagattttcgccggagatacagtagcaacgcatccagtctctttgcatagggattctgattctgcccgtgtggcaaatctgcagaaatcattggaagaagcgcggctcaatgaagccaatatgcgtatggagatggagcagatgaggcttcagatgctgtccgccgattcggtgaaattctcccagcaacggcagcgtatcgactcactgcgtcaattcacgaaaggaataccggtagttgccgaaggggataccctgttttatctttttacaaaacgcggcggatacactccccagcaacgggcacagatgaccggtgctgctatcgaagagataggaaagcgttttaatatccgtcccgattccgtttccatcgaccattcggatattgtttccgacctgatgtatggcaataaagtattgttgtctcttacagatcaggatgctttgtgggaaggagtctcccgtgactcccttgccaaagagaggcggcagaatgtaatcaccaaactgcatgagatgaaagcggagcacagcatttggcgaatggcgaagcgtatcctttattttctgttggtgattgtcggtcagtatctccttttccgtctgaccaactgggcatttcgcaaactgaaagtacgtatcctgcgtctgaaagatacgaagataaagcctgtgtctatccagggatatgagttgctggatgctcaaaaacaagccaatctgttagtctttttggcaggcatcggacgttatatccttatggggatacaactgttgattactgtccctttgatttttatcatcttcccgcagaccgaaggactggcataccgcttgctgggttatatctggaatccgattcggaaaatctttgtggatataatagactatgtccccaatctgtttacaattgttgttatctggtatgcggtgaagtatctggtacgtatggtgctttatctggctcgtgagatagaagcggggcgtcttaaattcaacggtttttacccggattgggccatgccgaccttccacatcgtccggttcctgctctacgcatttatgattgcgatgatttacccttatctgccgggttctgattccggtgtgttccagggaatttcggtctttgtcggattgattgtctcgctcggatcaagtaccgttatcggaaatattattgccggactggtgattacctatatgcgcccgttcaaaatgggcgaccggattaaactgaacgatactaccggcgatatcatagagaagacgccgcttgtcacccgtatccgcactccgaaaaatgaggtggtgacggtgcccaactcttttatcatgtcttcacataccgtgaattatagtacatcggcacgggagtatggcttgattatccattcggaggtatccatcggttatgatgtcccctggcgccaggtcaatcagatactgattgatgctgcgttgaatacgcccggagtagtggatgacccgcgcccgttcgtgctggaaacttcgttgagcgactggtatccggtgtatcagatcaatgcttatatcaaggaggcgcataagatgtctcagatttattctgatttgcatcagactattcaggataagtttaatgaagcgggaattgagattatgtctccgcattacatggctgtccgtgatgggaacgcaacgacgactcccaaggatgatctaagcaagagtaacactgcggatactgctagtcagagtaacaaatcagaataatataagctcgttacttaatgaacttgtgattttctttgcatctgtcggggcaaaggagtactataataaatcagggcgcccccttcatcgcgaaggagacgccctttgtcgtgtgtgttttttctgagagtagaatttctttctttaatagagaacttatttttttcgggttactgtataaagtacatttccttttttatctatcatacgcaggttaagctccttcttgtcgatagagcaaacggagaaacccggttcggggctacagaactttgtaccttcgatgggttctacctttcgtgcgagggaggcggcggagttgaccacatagtcaatgtcgcttcccggtacacggatatgctggaagttgtggatatgaccacagatgtacatatctacgttgtgcttgcgcaggatgctgtctacgcgtttctgcatatcaagccgctcgctttcctctttcggggtgtaggcatagatggggtgatggccggctacgatgatccagtcctccttggcacttgccagtacagattccagccatgacagctgtttgctgatgtcctgcttgcaggcatccggatatttatcgctttcattgcggtatttatcaatcagcggagtggtgtctatccagacgatgcggatagtagctcctttttcttcgaataccttggtgtagtaacggtcgggcattgaccagcggcggctgatgttcgtgtagtccagtactgcctgagtgcttccgcggtattcgtggttgcctaagatggagaaccagtcgatcatcagttcggggtgggagtagataagctcgtagttggtcatccacaaagggtcgttcacgctacgcactccgtcgaagtggtgaacgtctccggtggctaatacaaattcgggacctatctcttcgcccattgtccccatcagttcggcgattggcttttggtcatagtagccgttgcggcctaaatcattggctacatagaagttaaacttcttgtcaaagatggaataatccgttagctgtgcgtgggcgaatgtaaagacggaaaggaaaagaagaatgaataagctttttatcttcatattatattgattattagttgtttataattgttgttattgaaagactgaaattctctgtttttttggttttaaaggaaggaggcgttggtttaaaaccaagaccccgttcctttaaaaccaacggggtgttccattcttaggaacggaggttttcgcttttcgcattgtcagaagttaacttttacgccggcattaatctttacaccgtagtactccgcctgcatggtgcggtctttggttccttgatagtagcgaagaggctggttcagcaggttggtggcgtctgcatagaacgtggtctttatcttcttgccgaaggtgtagctggcgttcaggtccatgtagctcactgcgtcatagtaacggtcgagggctgccacttctcccatttcgtcgatgaagctcgaagcgtagttgtaggagaagcgtacgttgaaacctttcttttcgaagtaaagggaagcattggctgtatgttcgggtgatcccggcagggacaggtctttctcgttctcacgaccttcgaagttgaagttgttcacttgggtgtgggtgtaggtgtacgtaccatagaaaccgatacatttcagtgcgggagcaatgaagccgaagtcgcgttgataggccagttctacgcccagcaggtcggcgtcgccggcgtttttgggctgggtgaacttcttgtattcgttgttctgataggtgtagtcaccgataacctgatcgacgataaagtcattgatctttttgtagaagatgcctgcgctgatcagaccgacacttttgaagtagtagtctgcgctgaggtcgaagttgtaggagatggtcggggtcaggtcggagttacccatcaccagttcgttgtcgctgcggttgatattgacacaggggatcaatgcggagtatttcggacgactcagtgtctcggtgaacgaagcgcggagctttaaatcgtcggtcacatcatatttgaacaagaggctggggagccagttgacatagctgttcttatggtttccggtaggttcgagggtttctgtctcgtctttgtcgtcggctacgttccagttccagccgttgtatttgatgttggtggcttccatgcgtaagcctgccatcatttttatcttctttcccaagttctggtcgaagcggaagaaggcggaagttacgttctcacgggcgtggtagttgccggaggattcttcgagcacctgttcgccttccatactgctgaggtcgagtgagcccaggtattctttggatacgaaatcggtcgacttatattgatttcccggcatatatccgtcacgaatctgactggtgaggttgttcatgtaatccttgtcgaaggtgtctttgtacgcatctgcataatcatagcaaagggtgttgcggtctttggtcttggaggcgtactttgctccgaaccgcaggctgttgccatagataccgtttgtcagcggaagttcgaagtcgactttgaacttaaggtctttttcgtagatttcctggttgctttcggtcagttccttcactttccatttgcccctttcgctgtccgcttctccgttgtgcaggctgacgtccgtagtcacgtaagggaaacggtcgccggcatctacgacggtaaagccgaggaagtcctgtttcaggctgaagtatctttcgttcggacggtcttcgctggcacgggcgtaggaagctccccagttgacggacagctttccgaactgatgttcaccgctcagactgaggtccattgtctgttgtaattccagacgggcatttctgttgtcgggtgttcctccttttgtctcgatctgggcggattgctgcatatctccttcgtcgtctagtcctgtcttatccaaatccttataggtgacgcggtagcggttttcccagtcgtggcgacggttgtagataccttgcagcgtcagccggtggttcgggttgatgtcgtagtcgaaagccagtgagtagctttggcgttcgcgggttacgtagtactggcgtttctgtgcttccaccatgactacttcgccttttttgttgacgtcatattcaaactccacatcgtccgatcctgacggagcgttctgataggagatggcggccatcattcccagtttgtcattgaagaaacggtcgccgtaggtaaatcctaagttcaactgtgctttctggctgatccagttgtagccggttcctgctgtggcgctgaacatccgtttgtaaggagtgctttttgtcaccagattgatggagccgccgatggcatctccgtccatatccgaggtaacgactttgttcacttcgattgtctgcaccatgtctgcggggataaggtcgagctggacattacgggtatcgccttcggcagaagggaggcggttgccgttgatggtcacggaactgaggtcggcggaggtaccgcggacttgtccgaagcgggcttccccttggtcgtattgtacattaataccgttgatacgtttgagagcgtcgccgatattggaatcggggaactttccgacttgatcggctgaaacgacattggtgattccgaggttgttcttttgtgagttgatggcacggcgttgtccctgaaaggcgccgcctaccactacttcctgcagttcgagtccttcattgagtacgacgtccttttcgagcgtctttcctgccggaatggtgattttcatttcgacgggagagtagcctacgtagctgactttcacggtgtatgtgcccggtgtgagattggcgaatgtataataaccgttgacgtcgcttgtcactccggtatgtagtttttcgatgtagatggaggctcccggaagaatttgcttggaagtgtctactatgcgtccgcggatcgtaccctgtcgggctacgtttactttttcctctgcaaaagtatttccgcttgtactcatgattaaaagagtcaaagagactaatctgagaaatcgtttcataaatgttagcgtgcgttaattatttgctgcaaaagtagaggtttgacgtttcttgctttttacagttgattgaagaacgcgtaacaaatatgctacgattgtgttacgcaagaagggcgcccgcctgcggacacccttcgatacctaacccgataaaaagttatcttgaatgtatctgagatacgatcaattcattggaatgtcgatacgttcgcccgtaacggaaacggcgcttaaccggaaaccatctttccagcgaaccggaatggtgaatgtatctacagacgaaggggcattttcgccgctgcagatgaggatgaatttgtcggtttcatctttcacttcgtacgtcactacattggtccagttcttgatcgtgatggtctcaccgttgtaagtcaccgcattgtcgccggaacctaccgtaaatgtcttgggagcatgagtggcattctctcctttgatgatggcgggtttcgttttatacagttcgtacgtattatctgagatgtattctagagcgacatccggacgggtgcctcccagtgcgttcactttctgtttgagagcgtctatcatgtcttgtgtcacggtcagctgctttttcccgtagtcgtccagttctttgtctaccggagtcaggaatccccatttagtgaagaagtcgagtaagttcataccggaaatcttggagcaggcatacacaaagtcgagctgaatttctccatgagtcattccggtgtagtctttattacgggcgtattcatatacctccggataaaaacctcctttgtccgtctgttgcaatggagtcctgcccagtactttcccgaaatagagttccagttgccagaagggaacgagcttacagaatacatcgttggcattattctttcccagattctggaagtcggcgtgcgggcttccggtggcgataatcccactccatgctttggagtatctgtttcggtaggtgattcccatgtcttcgacctgtatgcgggagggctggccgaaaatggtggtctgtatgtactcggacatgatgttgttcgtcacttccgtgttgccgccccacaatactcccggacgggtctgattgcaatgtcctatctcgtgtgccggtccccagcaggcgcttgtcttcagcttttccggactacagatttcattcattgtagttcggttgtaggctgtgtgataggctgtggcgtacatataggaatgatacatgacattcagatacatccggtttctgaacatcttgtcatatttctccaagcccagcagctgctgctcgctgtacacgatcttgtcataaaggtctatcagttcatctcccttggaacctgcgtacgtccggaggtcactcgtctcgaaagtgaggtgggcatatttccccagtacatcgaaatatcggttggttgctttgttgagcagttccgaccaacgcccgttatgctccgggttttgcgagtcgaagtagccgttcacttttcccgatgcaaaatggattttgattggggccgctgacggatcgtccagcgtttttgtgacatacatcacatacaccagtccttgttcgctgatagtaagtttgttgattccctgattcagtaagtaggtcactccgccaaaaccgtcattctccggtgtatccagattctgtacccgcagtccgatgtcatatccgtgtgtgtctcccaccagcacaatcaggttttcacctgccttgaccgatattccggttggattgtccaactggctgtaagggttggtcttgtgggtttccgactggatatccggattgggatatgccttgaactcactgatacggaattctctgggatacttgcctttaatcatatagtaggctatattcttaaagaacgggtattcgcacttcactatgtcatcttccgtaatacctgttttcagttcactgcaacttgcatctgtgaagagagtcgaataatcaaagttcacgggattctttgcgtagaattccatttcggcacatgaagcaaatccttgtccgtcgccggaaccgctctttacgatgaaacggaaagacttcgcctgtatcgtttggtcaaatgttactttgcctgccgtagccgaaccttgaaaatccttatcaataagttttgtgaatgtgtgaccgtctgctgaatattgtatttctgtatctttaaatctaccattatttccgttgttgcgcggatgatatatcaaataatcgatatctgtgactgtttcaaaattataggttaatgtgatggggaaatagttgcttgcaccattactccaactggaatgataaagtgtcgaataatctccgtcaaaagacttttcgatgttgctgccgggttgaaaagaagaagccgtcccgctcactattttgattttgatatcaccttttacgtcctctccattgccttcggcaaattcgttgagacctttctgggtaacaaatacgaatgcgcttacaggttctgcctgttccgtatcgggatcgatagtcggtaatacttctgttatttcaatgttgccatgacgttgactgtcaagtccggtcgctttcaccatatatctatggggggtggtgactgtagccggtgcacggctggcaggttttgcggtaatccattccggcaaagtgatggctacttctacatttgtcgtcacgttaaactggatttctccaccgataacacctacctcgaagctggactggtcaaccagaatggctgcttcgtatcccaactggcgtactgtgattgtctttgtctggtcggcagctatcacggtaacggttgctttacgcacgtaccgttcttcactttcgtctacagatattttcagtgccttcccgtctgctgacgggtggcaccaatttttatctgatttgacagtccaggtatccacattggtagtgacagctacattctggctaccggactcactcttgaaatcaactgtctcttttccaacggttaaattgggggttgaagagccgtcatcgtcagagcatgccgtagataggcatggcagcaacgataatagaaagaaaagcagtatatatttcttcattctttttttttattcaagtacgaccattgaacattgatagatttccagttctcctaaagcaaaataaggagtgcccttcgtggtctctgtcacttcgaaccaaagatagcgggaaggttttgacagcggaattacctctgagttgtacacttcgctcactccgtcgggaagtcctgttaaggtcgtttccttgtgggtgcctgcctgtgagatatccactgtgttgccatcaattttctcgacgccatcaaaccattctgctggattataactatcacttgtatataggttgatcgttttccatgaactatcgttcgcacggttggtattggtcgaacggaatttaatagcgctgacttcttcgcctaaatctactaccagataatgtggcatttccactagtgagctccaccacgagtggaagaaggttgctatatttccgtctaccaggtctttgatcggacgggtaggaaatggagcattcgtccatattttcttatagtccagatctatctttacgggagtgccaaacgttggacttgccttttctgcttgtgcagttatctgatggatggtgcctgcggtgttgccacgattgaaggcttgtacggtgaagttgatttcaccgtacttttggagcagattgtctattaccagttcattggcatattgactgacttgttttctgtatgactttcctgtggctccgatggtatattctatctgtacataatataagttttcatcggcagggttggtccagctcagggtaatctgtcccggagcgggagtcgctttcagattttcgatgtcgctgggtaccggataggaatctttgtcatcgctgcaagaccagagcatggctaatcctccgataagacatatcgtcataagtatctttttcataatcagattgtttttaataattgttattcatcattgattagtagcccggattctgcaccatgttcgggttcttgcttacttcacctgccggaataggcatcagatactggcggggggcgtcgaatgtgcgcttgtcctgtatctctacaatcttggcgaagtcttccagtgtctcggcaagaatgttcagaccacgtactttgacattgaagtaagtatctgccatcttccagcggcggatatcccaaaaattgtgattttcctgataaagctcgatcatgcgttcctgtctgacgattttcatcactctgccgtcaggaccgcattgaccgtcatagcttgtcaaaggaactttggcatttgcccagctttccagtactgatttgagtccggcgcgttcgcgtactttgtccagataagccattcctttttcgggataaccttctttgccgtatcctacacaggcttcggcatagttcaggtaaagttcggcgagacgtatcacaggccacggatattctaccgttggtccgggggtaccaacggtagcttgtatccctgggtgtacaccttttttgttcaggtatcctgttttggagtagttctgagagcgtgctgcagtgacaatctttccgtcatcggctctgacaccgcagttttctgttgccagaaatccggtcaaccacttgtctccttcagaacgctcagcgccccagaatttgtgataagcatatcttttatcgtctgtacgacattcataataaccgttctcaaaagcaatccacgcatagaatcggggttcgcggttcatgttcatgtataatgttctttttcccggttcggcataggtagtgccttcagggatggttacgatatccagtttgttgtttgtattgaatgccgggtcttcatcaatcggtaatccattgactgtgtagaagcggtcgagcatggtaatagtgggggctataccattccacgaaccacgggggaagaaaggtatggatttgcgttggataccataagcacctgctttacgggtttcggggaagatgacttctttgaaattctcgctatccataaaggtcatacgaagtgtgcgttctgtcaggttggccggttccggataagcactacttgcagtattggcgatatagagttcgtgaccggccgctaatgctgcctgaatagcttcccatgttgcatctgctgcacgtttgtatttttcttccgaataagtggttggcatgagctgttcgccgtctgggttcttaaagtctgcatagtcaggatttccgttgaataatggtgaagcggcataaagcaacatacgtgcttttaagcttttggcaatgacacttgtggcacgtccataatccgagctattgcgtgtggcaggaagtctggtggctgcatcgtcaagtaagtcggcaacccagtcgatacattcatcgtacggacgacgtccgagcatattctctgcgggagtgtcgagtgccggaagttctttcaccaaaatactcggtccgtagcatttgatcagcagtagatggaaataggcgataaggaagtcggcttctgctgtgtaaagatcgacttcatcctggctgattttaggcacggagttgatgttctctttcagcaaatagcattgacgtattccctgaaacagtgtattccaatagctgataatccagttgcttgagtcataggaaccttcggcgaattttacgtaactttcggcaaacgggctgatcgtttcgtcaccggtaaagtccatacatgacgaaaccatgtttgactgaggaagatatccgtagcaggaatataaatatcgcagtgcggcacggggattggcaaaggcatccttttccgtggctgtttcgtcgggaacgatatccagatagttacaggaagtattcagccctgtaatcaataagaggatgaatagatatagtgtattctttttcatatctttaaggtattatttgttgttaatagtcatttggaatccaatgttgaatacgcgctgggtcggatatgaaagaccactgccaccaccttgttcaggatcccacaggtcgaacggcgcaaaagtcagcaggttggagccgctgatgtacaagcgcatatttttataggtatagccgatttctgcattctttaacttcaggaaggcaccgttacgctcccaatagctggacaatttgttgttattattattggttttgcgtgacaagcgcgggtaagtcgcattggtattctgattatcgggactccaacgttcgtctgccacccatgatagtacgttgcgcagcatattgtcaccgaaaggatggaaatcctttaccatgaaggaggttctggctattccctggaagaagaaggagaaatccagattcttccatttaatagagggaccgaagccatatacaatctccggtacgccgggatgttttgcccatacccagtcgtctgtatctgtctggttatcatcatatccgtaccagtctcttgaaatattgatatatttgatatctcctggaatcactgccgctcccaattgttgttggtggttggcaatatctgctgcatcaatgaagagtccgtcggcaatataaatggcattcttattggcactgactccgatttttgactgccatggatatttcggtgattcatcatattgggtgatttcattatgcgcatatgtgaaagttcctttgaagctgacgaaccagtttttgttgaactgcttgttatagctggctgctaattcaaatccctgattgcgcatagctgccaggttgccgtatactttagtggtagctgtacccatatatgtcggagtggtccctttctcctggaagatgtcgcgacgattttcgcgaaagatatcaaaagtaaggtctaaagagtggaacaattgtaaatcgactccaaaattaatcttttctcctacctcccatgtaatatcttcattggcatagcgttgataaacgggaccattgtaggttacattctgattgacacctgttgtaaatcctttgccgcccaggtcaatttgagacatgtagataaaacggctgccattaatctggtcgttacctaccagaccccacgaaccgcgtagcttcaatttagaaacaacgtttttcaaaggtttgaagaaagattcttcactgatgttataacctgcggcaatggaggggaacagaccgaaacggtgtcctttggcaaaattctccgatccattgtatcctacgttcacttcagccatatactttccggcataagcgtaggaggcgcgtgctgcaagaccttgtttgcgttgaggcaatgaaccgataaagttcccatcgcccggtgtgttgtttacaagttcgtcctggctatagattagcatcgcattgacgtcatgttcaccgaatgtacggctgtaattgaccattccttccaaatagaaacggcggtcgccggaatttgtattctttgcggtcaggtttgtcgtatattcgtctccaatacggcttgttgtgtaggtgtagccaccattgccatcgtcttcgtatccggtcagtgcgaatttgttccacttcccttcacgtttgttctcggaactcgaccagttcttgaatgaagccagtgctttgaaactcagaccttcggtgatgaaatccaacttctggttaaattccagtgctgcaatgactgtgctttggaatcctttgttgtagcctgtagcagcctgagccaccgggttggtctgatagtcggcgttgacacgttctgtagctccccatttaatataaggtgtttcaccgtcatccggaaaatataccgggaattcaacaggtgatgtattcatggcattggtaaagatggctcctactccctggttaggagtagtcatgtcacgcaactgtacgttcaggcgcaaggacaacttagaagaattgctcaatttggcgttgatgttattctggaagttatagcgcatgatttcaatattgttattataggagaagaaatcctttgaacgattcttcaacataccggattcgtggttgacagagatgctggagaagtagtctacacgtttaccaccgccacggatgttaaagttgaacttttcgctataagaagcgtctttaaacaattcgtcataccaatttacgttcggatagatataaggattcaatccggcacgtgttccgtcaattctatcttggctgtaaagcacgtcaccgctattgtcattgtttacggcctcgttgaaaagttccatgtaagtggcaccgtctacgaatttaggggtactggtcggttgagacatttgtgcttccatacggaagttgataatcggcttatccagattcatacccgatttggtggttacaatcatcacaccgttggcaccacgggtaccgtacatcgctgttgcggtagcatctttcaggatagagaaactatcgataatctcgggatcaagattattcaggtcacttgaacttacctgcacaccatccagaatgattagtggatcggtgactccgttcatggtcgaaacaccgcgaatccaaaagttggcgccatcagctcccggctgaccacttttctggacggcaataacaccagccagacgtccggcaaatgcagtagacagattggtagaaggtacctttaattcagttggtttaatagattcaacagagcctaccatactggctttcttttgtcctgtaccataagctgtgatgactacttcttccaactgcttggcatcttcattcaaatcgatggataacactttgcgtgaaccgatcttgatttctttgggtgtgtatcctacataagaaatgagaataacatccgaaggagcagccatgatcgtgaactttccgtcaatgttggtgattactcctgtagcagcccctttgatttgtacggaagcaccgataatggattcacctgtattggcgtcgactaccacacctacgatttccgactttttcggtccctgacttttttgctgaacagtctctgctttcgcgcttttcaagataatttcattattcttgatgacatagtcaattccgctgttactgaatacttttcttaaaacttcattaatgtctccttcgcaatcgtagtcctttttctcgtcattggcgacaacgccggacttgaagaagaatgtgtactggctattttcttcgatcagctgaatagcctgttgcatggtgatggactgacccttgagaatgattctctttccttgtgcgccatgagcgtagagagccattggaaggaagcaaatcaatagaacggcatatctgagtatgctgttactaaaatgcatatttttcatgtttctaaaaggttaatagtgaatatatagataatttgtttttaatgtattaatataatatgatgtcgttattttcttgtttctcttttaaatcgaggctgatacatatcttttcgatgatattggtaagcggctcgtctttatgtatggttccgttgaacttcagctttttgagcttttcttctttaattatgatgtttacatggtatgaacggttgataaaattgatgaattcctgtaatggcttgttggtaaagcgatatttacttgagcgccagtcatactcgttgatatctatattcgtgcgtacaactgatttggcctgggtattgtatacgattcgttcgttcggttgcatcggcagttctcgctgtccttcctctgcctggaatttgatggagccggtgaataaggtaatttccgattccatgtgcccggctttgatgttgaattccgttccggtcacttcaatacgcgattcctggaaataaaccctgaagggtgctccctgagcttttttcactttaaagaaagcttctcctttttccaggaagatttctctgttgttcagaaatgacttgtgatagcgaatttgagaagctgcgttgagccatacttccgaactgtccggcagcatgactgccagcttatcattcattggagcactgatattaatgtcggatgatgaaatattgttggcaatccaaaagccgataatgaagatggcaacagtggcagcgatggaatatccgatacgatagtatttcttgtttctctctaaaggctgtttttcgttccggcatctgactataatcttattgagtatggtgtgcgggggaacatgatcttgtatatgagctttaggagctttatcccattgttgagactgaaagttaaccataggcttctcattgagaagctgttccctttcggaagttgtcagtctgtcggctaacatcttttttataatattaatgagttctattgaattcacgcccttatatattagtgataatgattgttattgacttcggttacatactaaatactccccatattacatttacccctatcggatataaaaaaaaatgtgttttatttttgtatcttttaaataatgtatagctttgttgtcactaatatttgcacaaatatgaacgaaagagaaagagtattggctattaagggcggtgatcatcaggcgtttattgatttgtataacgagtattggagtcaggtttatgactttagccgattgtacatcgctacaattgttgatgcagaggaaattgttcaggatgtgtttgtgaagttgtgggaatcaaggcatttactgaaggaagatgaaaatatcaaaggttttctctttattgttacccgaaacatcgtatttaataaaaataagaagagagtaaatgagaatcttttcaaaacctctgttttggtagcctatggaaacgaaggttattataactccactactgtggaggaggattattgtgcttcccaactaaaaaatttcattgatcggttaatcaattcacttcctgagcaacaaagaaaatgtttcctgttgagtcgtgaagaaaatctgagttacaaggagatagccgagagacttggtattagtcagaagactgtagaaatacatatgggtaaggccttgaaattcttgaaagataaggtgaaacgaggctgggagattctattgtcgcttctttcattttagttataaaaataagacattccttctttctcattatttaatagtgtcggaatagacttatcttttttcttgctgttcttagcaggctgttactttatctgtattttcaatagcctcttttcttttcagatagactttctgaagtagtcagattattaatgatgtaatagaaactcatgtacttttggctataatcaagttttgaggctgatagtaataagctttgattcgcaaaaattatttagtaataaaaatagttggaaaaaagtttggtatggcagctttttttgcactacatttatcattcatcgctgtttcaagttaggcgtttccatttgaacagataaatccgacagcattccccgatcatagttattgtatttgaaaacaatgattagaatgtagtttttcgatgtggaattgcaaggtaacataataaataaagctttaattaatttggacaaaatgaaaaaagtactgttaactttaagtttgagtatcgttgcgtcgatgggcagtttcgcgcagaatgaaccctataagaatccgaaacttgctccggaagagcgtgcggaagacttaatagggagattaaccttgaaagaaaaagtaggattgatgaaaaactcttcttttgcggtagaacggctaggggttgctccctataattggtggagcgaggctttgcatggtgttgcccgcaatggactggctacagtgtttccgataactatgggtatggcatctacctttgatgatgaagcaattgaaagagtgtatgttgccgtcagtgatgaaggacgtgctaaattccacgatgcacatcgccgtaaccgctatggatatggaaacgaagggcttactttttggaatccgaatgtgaatattttccgtgatccgcgttggggaaggggacaggagactttcggtgaagacccttatctgaccacccgtatgggagtagctgtagtaaagggaatgcagggaccggcagatgccgaatatgacaaggctcatgcgtgtgtcaagcattatgcagtgcatagtggtcctgaggcgaaacgtcactcttttgatgtagaagatctctctccccgtgatttatgggagacgtaccttccggccttcaaggctttggtgcaagaggcagacgtgaaggaagtgatgtgcgcttatcagcgcctggaaggagagccctgttgtggtagcaaccggttgttaacgcaaatattgagggatgaatggggctataaacatctggttgtaagtgattgtggtgctattgatgatttttttgtgaaagggcgccatgagacacataaagatgctgcggatgccagtgcttctgctgtgatcaatggaactgaccttgaatgtggctcgatatattcgcatttggaggaagctgtgaagcagggattaatcacagaagaacgtatagatacaagtttgcgccgtttgttgaaagcccgttttgctttgggcgagatggatccggattctatcgttccctggagcaaaattagtatagatactgtggattgtgatttgcacaaacatatggcgttggatctggcacgtaaatctatggtattgcttcacaataatggtgtgcttccgttggcaaaaacaggggcacgtatcgcagtgatgggaccgaatgcggttgattcggtgatgcaatgggggaactacgaaggtgtaccctcgcatacatatactattttggaagggattcgctgcaagataggcgatgtgccttttgagaaaggatgtgagttgctggataatcggatttttgaatcttattttaatgagatctccaacaatgggcgtcccggtttgacggctacctactggaataatatgaatttgagtggtgatgtagcggctacaagtcagattacttctccgattaatctgagtaatggtgggaatacggtctttgccacaggtgtgggcttatataattttactgctgtttatgaaggaacttttcgtccgaaagagagtggagcttatgagttgctgattgaaggagatgatggctatcgggtatatgtgaacggggaaaaggtgattgattattggggagaacatgccagtgctaaaagagactatacactgaaagcgactgcgggaacagattataagatcagaatagaatatatgcaggcaggtgcggaggcattgcttagatttgatttgggtatttatcgtcatatttcacctgagatggttgtcgatagagtcaaagaagcggatattgttattttcgcaggtggcatttcgccgagtttggaaggcgaagagatgtattccgttaacagtcccggatttgctggcggcgaccgtacttcaattgaactaccgcaagtgcagcgtgatatcctgaaagcattgaagaaagcggggaagaaggtggtgtttgtcaactgttccggatcggcggtcgcattggttcctgagatggagtcttgtgatgctatcttgcaggcatggtatcccgggcagtctggcggattggctgtggcggacgttctgttcggagattttaatccgagtggaaagctgcccgttactttttataggagtacggaccagttgccggattttgaagattacagtatgaagaatcgtacctatagatatatgacggaagttcctttgtttccttttggatacggattgagttatactactttcgatatttctaaaggacgtttgaataagaaaattatatctgccggacaggatttgaattttaaagtcaatgtgaagaatacagggaagtatgatggagctgaagttattcaggtgtatgtccgcaaagtagatgatgcggaagggccgataaagagtttgcgcgctttccgtcgggtaccgctgaaggcgggagagacttgtgttgtatctattgatcttttgccaactacatttgagttctttgatccgactacaaatactatgcgtattatgcccggaaaatatgaaatcatgtatggcaatagttcggatataccttcggggaataaattgagtgtaacacttcggtaataatattactcattaatgggggtgtcaaaagtcagtagcaatagcttgtgtattcacctaccacctccccctgcgggtactcctccttcccgaaggaggagatttaagatactgccgacttttttgtcagccccagtttcgttactattgacttttgacacactctcatttatttttcgggaaattcagtctgggattttaaggacagctgagtgatccttatccttttttatcgttcctatttcatatactgatgtaatggtgcaggaaggggctgtgttgtaatgctattacagactcaggctttctcacagcggatcagtactttttgtccgttgtttaaggtgctggcaaacagataagtgtctccaccttccgacaatttgattcgtttacggagttcggcaaccgtagccggaaagttacgtactgtgatatttgcttttttcaagtctccgagactttcttttagttcttttttattaaggctgcactgactaatgatgtggaaagccctgccgggaaagctctcgaccaacacatcagaagtataaagatgactgttaggatgcagttttttaacaggaaatgcggaggcgatgctgcggaaagctccggctttcaggagtgaagcgttcggctcatagagataattttccagtgcgttggtatagttgcattcgctgcactgctcctgttcgcgggtgaatacgaaatgctgttcttcctgtatccccttggtagggagatttacgcaatggatggatatttcttctaccgatgcttgtccgagtatcagtagtaattctttgcattcattattggcagatatgatgtgaactttctgtacgtgttgtaactctttcagtgccaatgacaagtccagcatgggcgagagtttgaccatgacctgtcccgctttgttcagtaagagttcttccagttcggctacatcgggttcacagtctgagatggcaacagtctttcctccgtgctcgttgcggcgggcaggatcgaggaagatgcagtctaccggagacatagcttgcagataactcactccgtcctcgttctttacgttgatatggtttaggttcaggatgggaaagttgtgtgctgctatctcgcagagttcctgctggcgttctacgtaaatggcggatttgaatttggcagcaaggaaagcgcagtctattccgaatcctccggtcaggtccgtcagggagttaccttttaaaagggttgctttgtagcgggcggtgacttctgacgagcattgctccagtgataggtgcttcgggtaccatatatcatccatgtcgctccatgatggaatcttttcggcggcaacctgccttcctgctatctgtgtgatggcggtcggcatatctacattcgggtattttcgggcttgcagggccagagcacgtacatcatccgtctgatgttcgcggataaagagctgggtttcgggggagatttgcatcataggttgtttatattcggcgttatatggtggacttgtttatggtattacgttgtatttcttccgggcttcttctcggctgcagaagttgaaatgccaccattcgctgggcaatgcacggaatccggcggctttcattactttcctcaataatatccggttctgacgttctgttttggtgatttttccgttgcgtatcagttcgccttcttcggtgatgtgcgcttctactccaagatgatcgacctttgtgcccataggcaacggtcgccccagcgagtcctgaatgctgatgtctaccgccaggccgtaattatgaagtccgcctccacggttggggttggagacatatctgtatttggaagttcctttgaccacatcccacatttttctctgtacggacatcggacgtgcagcgtcgtaaataatgagactgtaagatggatgcagtgccttcagtgcttcttgtgcttttaagagggcatacgccgcatgaggatgcagataggcttcggacaggttgtcataaagaatttctccggtgaagttatccgcttttgtgtacattaggctgatggcgatgctgttgtccagctccgctatatttattagtcccagagaatccatgtaaagagccatcgggcttttctgatgttttggaaccagtgtgctggcggattcatttttctgcgagggggatgtataaatagaatctgcatcaatggagtccgcatgagcaaaggatatacagtcggatgctgtaccttcggggcttatatctccgggtcctgcgcatatagagtctgtgcacgttgtttcgacctttgcagatgtcttcgtctccttatgccccggtacacaggaataccctgccagcagaaagcaaaagacagataaactatatttcagcatcatcattactcctttgggttttgtgtgccaaagatacttctttttgaatttagcaccaataaaaagccttttttacgctgtttgttggatctatatatcctgcgcgttggacatatatgccctgcgtgttggatatatatcccctgtacgttggacatatatatcctgcatgttaggttactataccctgcatgaacggtaactataccctatatgcaaatatagtctgaataccggcacaccttcttctgtgatttatccggattttcagcggttgatactgactattactttttttagattggccgtattcttccatatttcgagtagttgcagaatacgttcatccgttactctgctgttattgacagacagcagttccgaatatatttccagcagcttcttcagttccttgacaggctgttccggaagttcggcaatcagtgatgtaagtagcagctccagttcccggttgtgtagtgggctgacgtttatcatttgctgttgtatcaagtcggtaagtcttttcagaggtccccatccggtacgttggtgcgaacccagtatcctgccgatacgtgcactgtctatacatcctgtgttgacacggtccgtccatattccggcggcataagaacgggaagtcttgtcggctaccagcatacaactcgcttccagcagataagaggtctcatgccattcgtgccttaattggtgaagtgcctctatagtggcttgggtgataccaacttctctcacttcatttagcatcggatcataaatggcacagcggatgcaccatacaaacaatggttccggtgtattgggagctagccatacaaggcggggcagatcgttttgtatatcgtcataacgttctatctgtgaatacatttccaccagtagcggatgcgggtcatacgagtgataattcactctctcatcatactttcctttgttgacgatgtggatgttctctccttccggaacattgaaactaagggttgaagatgtccagttgaccactttgttgtgataatcagtatatgaatgaggcgtttggaaagtccaccatgagaagtttcccgtcagaaattcgcgtgagcttttgctataagagaaatctttaaattcagtataaaccgtctccggtgatttgatcaatcctgctgtcatccaccatgaagggtgggcgaagggagcttgtggaactgcatcttttgctcccatcaagaaggaaaacaaattttggtattccccttccaattcctgaaggacagtcggaaggtcttgcgagggataatcattcaatgccatcctcgacagggctatctgtatatccatatcgtccggctcggcattggcctgctgatattgtccgagtctttttatcagaactatggggtcaataaatgcaggcgtatgcgtaggagtggatagcatgggaagtcggttctcgttgctttccaaaaggtctaatgtccggcacagtaattgtttgtgaataggtaattccgttcttttattactcttctggcggatggttattttctgcagattgcgatatctccactgacctttctgaagttcgtctttctgcaccattttctcgtgcagggtgctcagttcttttgcttctatggggaaacgcttgattaatagttttgcatagtcgataaggaacgttgccatcatagaatccaatattccgttgcgtgaacttccgccattgataagtaacttataggcacgttgaagaacaggtgtccattgggtgatatgtttcgcttccagttgctcattccattctaccaacgcattcaggaaaaggtcgaagtggtatagctcattggaatctagtatttggctggccagaaatagcaggtcttcgatggaagtaatttcctgtatccggttgtcttcccgaaggatgggtggcatcggttcatagtcgaaggaggcgacatttgcctgctcgtcaagagtagtcagcaagactttatcggtagataaagcatctgaaacattgtctttcagataagctgccaactcttttttagtgctggtcagcattgtttctgcataagcagagagtgcttctttcaatgtgggcgactctgtttctccaaatgtttgaatcagtttcactatcttgttctgagtagattcgtcgcgactcatcaacccttgtgtggcagcgcaacagatggcatcatgatattcttttttctctttcgccagtttgctgagaactcccagcgtgttttgatggacagcttttacgtccgaagcgaagaggacagtggtctgatccagaaaatcatctgtcaggaaccgtggatggctgcacagattcttcagaagaccgaggatgatattgatcggacggctatggggagaagatagtgcggcaaacatttccggctgcaatgtcagttgttcttcaacgctgggattgagtgccgtaaacataccggcaaaccagctgcacaggttcttgttgaagttccggttgattgccagcaaagactctttcagtacacgcatacggtctaactttccgttctcggtgaagtgctggaatgtataataaggatatcctttggccggattggcgtgccagttttgcccgcagtcatattcaaacaaataccagatgtgctcgttgattgtaatatcccgcttttctaatacgggggtagtgtggatatagttaaccagataacctgctatcgtctgcggagagggggaaacggtgagaatacccctttctatccagtccatcaatatctcgtagtccatattgtagaagcctccgaactccttaccttcaccttcaacgaaataactgtccagccacgtgggaatatgccatgcggctatctcgttcagatgcgctgtgtttatcccccattcgtgtttgcgaaattccttgaggggaaatatcacaagggcggcaagatcaataatgtgatgctggcccgacgtggcacgcgtaccatatgtcctttcttccagctggacaaacttattatagtattcttccaaccggctgaggcaagggatgaggctcttccgctcctcctgtgtcagtttctgcagaaaaggaatgatcttctgcccttgctctttttctactatctcggtaagctgtgtttctagtgcagtcatggttataattttgattgaaggatatatgataacaatatccgtgtttataaattagtctactttaaatcaattaagatcacctgaaatgataaaaaactgataccaagcaatattacctattacttatcacctttttaatgcagtaactacttttttcagattagcattctttttccacatttccaggcgctcacggactttgtcgtccgttacgcaatggccgttcacgcgcagcacttccgcgtagagttcgagtaactgtttttgtccggtgaccggattgtcgggcaatccgccgatcaatacagtgagtaactcttccagttgttgattgtgaaaggcgcttcgtttgtatatgctttcatacacttctgtggtgaagcgttttagcggaacaatgcccatattgataattcgtgctactatttctcctagccggtgattgtctattctgttgttagcgatgccttccacccatagctccgcagcgtatgaacggacggttttgtcaacaaaaagcaggcctccgcccagcaacagtaaactcatctcccgaagcggacagtgaaaagacaataacatacgtaaagcattggctatactgcgtttgctctcttcctgcggtgaaccgaaatccatgtagcagttaatgatttgtgcaaccagtggttccggttggttggggaagaagctgaacagacgttccatatagtcggaatcgcctatattgtatctgctgttgatgaccagatgttcttgccaaagctggtggctgttgtgttctgcatactcatgccacttgtagaaatcgagctggagcagacgtgtatctgctgcatattgattttctttctgtgccggttctttccagccataatttcctgtcaggtagttgtggggcagcgtgttgcaggagaagtttttgaatgcttcaaattctgtatccggctctttcaccagtccggctgcaagccaggcagatggatgattgtacggtggttcgggctgcgtctctttatctaataaaaagagacaaagatgcagatattcattatttaataattgtcgggcgacagcaatggcttcttccttgtcttctagagcgcagcgtgctatggccagctgaaagtcccatgaacaaggctttacattcgcttcctgataaacggcgagccgtcgtataagttcggtgctctggatgtataccgggatatgtgtcggagtagagagtaaaggtaatgagtcgcctttttggattttacggattacttccagccacaattgtttgataggttcaaaacaggttctattgctgtaagttggctgccagtctgcaagacgcttgaaagcacgttcgtcgtaggctcctctgtttgcgtctattcctttaagtctttcttccaggcgggtaaagagcttacttaggaatccttggttggcagtgtctttttgtgtccataaacgttgatattccagcaggaaagtggcaagaaagttctcgtataccgcccaactattgataatgatgttggctgcccgttggaatacaggctccatccggctgaaatcttcttcatccaactgaggatggaaggcgatgagggcggcaatcgctgtgtctgtttcccaactttcattcatgtcgaacaggcggctgagctggaacagaaaatcctctttattggcaggaaacgggatgcggttgtctttccgacaaatacgaaccttttcttggaaggttgtttcgggaaggccggcttcttccgcaggctgcttcatgaaagaaacaagtatatcctgtacgctctggaacatctcggattggtaagatagcaatgtctcttgcaatgtagaagaggatgcgtctccgtattttgatataaagctggcagctttcttttgcaggctttcatctttctttaggaatagttggcagagtgggatgcaacatgcttctttcatttcggggtgcccggtaacgatctgctcaaaaatggaataaatagtgagcaatgagtttttggggctggaaaagaaaagagtagtcgcacgctcgataaactcctgatagtggaacccgccttcggaggcaatcttttttagttgttgtaacatcacattcaccggtttggtgtatggagaggtgaacacttgcatgatttcctcttgcagggatatgagttcttccgcccttggctgcaattcttcaaagagtccggcaaaccaatttaccatgtcttttttaaaacttcggttgaaggtggaaagtgttgctcgcagaagctggtttctgtccagatgtccgtcgagcgagaaacgatagaaagcggcgctaaagctttcatcccgtgaggtggtcccttctttataggctgtttgggcacggtcattatgataaccaatggatgattcctgttcgaaaagataccaaatgtgttcttttagggtgatttctctttttaacagtaaatcgctgttaaaagtgtctttccctttaggaagggaagatctgatacagatgtaaccgggcaatatttgtgcgatacgttttggagagagttcttgcatatagcccatatctatcagctgcatgagctgttcgtaggatatattgaaattcaagtaactttccgcatcatttatatactctgccagccaactgggagtataaagagaaagcaatttgcaaagtaagttgaagtttatgtggtatcccaggtccatttctcgtttgttgccacatacgaactgtacggcacccagaaagcgtgcccggtgatgatcgcaaaaagtttcactaaacttgccttttatccattgcagttcccgaatagtgggcaggagttttctccgttctttcactgaaagttctaacaaccttttgataaaaggtatcaatatcttttcttctttctccggagtatccacataagttttggataatttctccaactcgcgtttcagttcttccattgtacaagtttctttactgctaaaatatgtttgcaggctccccgttctccctgattgccgctaaaccaggtacaggtgcaacgttctttttcactttccctgtccaaaataaccgtatgtcttactcctccgctcccagcgacacgtgcttctgtccggtttccgtcatttgatataatttccactttctcttcttccaatagcttctcggcagccatcatacgcggattgagactcaggatgcgctctgtcttaaaaggcaggcgacgataaaagaaactattctcatccaagtcgaatcccagtaaccccatagctgccagtcgtgcggatagagaatccaccttatcgagatcaatgtgctcctcaatagcgaaaagagtggggttgaactgctggttggcgtaactgtatttatccatcgcttctatccatttctccggtacgtcttcaagcagagcgtccaatgtcgcaccttctcctgagaatccgcgccaacattccctcgacagggaaaggctgaaacgaaccggaccgaaatagagttgccagatggtcgattgcattgtcggatgaacaaagactctcagctcgtcggcaaatggcaacaggggttcgagcaggcgcagacgatgtactcctccgatacaaacggcattcagacttttcaccggtgaaaaggccggtttttgtccgcgcatcaccaaataatagtcacatttcacggttcctttggggagtgtctgaaagagttgcaaagtctgtatgcgattgaaagaatacatccgttcggcaacagactggtaaatctgtaccgtggtcagcccctttatccattttacgggcagcggtactttgcgttctattactttttcacctttattgtaaagccctacctccttaggtccgactgacatcactactttttcttgtttgctgatgcttcccaatgcagaaatcataccggcattgaagtcaacattcgttgttccgttctccagaaactctccgtcgtgtccatcgggcagtacgtcgactctggcatatacgcctgcacaattcgaaaatccttcgaagcgtaaacgttcatttcctgccgtcacaatcgggtctttcagcatggaaagctgggcaggagtcagattaaaactggattgtactacgttggacaacgcaatgaggcagcgtgccgtcatataaggttgtgttagcttcccccaaaagaaacagggagcttctttcttttctatttcactgtattttgccagaaataattcgtcctgatcagacgaacgttgtaagacagacggagcagcgtattgatatgaaatagtatcggtcatagataaatatataagtgcttgttggacatttcccaaatatagaaattaaatctcagaatggaaagttgttgagtagtttactctgtttgtgatgctgggattgtgattttataaagtgaaatattttaggttgtttgcttcgcttttgcgttttgaatgcgaaagtcagtgtttgcttttatggattgttttttgtttcagtataaatgattgtttgctgtatattgctgataaataaagaattattcgattattaaaaattattcttaatagttttagatagatctttatatctaaataaattattttttataactacaattatatagcttttttatatgtaatggagaaataatatttttgcggtgaaatattactttcacattagagagaactaataagtgttatgaaatatagattaagaaaaggaagctgtttgtgaaaatcgctccaatattgtttgttttgtttgtgttatcccattttggtgccaagagtggttttcaaaatgggattttttttggctgattaaaaagtcggtagtatcttaaatctcctccttcgggaaggaggagtacccgtagggggaggtggtaggtgaatacgcaattcttttattcatagtaaattagagataaccttgtttacctaccaccccggctttcagccacccctccttcccgaaggaggggaattggagatactattgcctttttagacccccaaattgatgatactattgactttttagtcagtccctatctagtttttttttaatgatgcccgttttatttacctcttccgtatctttaaaatcataatcttgtgggaactagtatattctcatatactttgggcatggaataaattctctgaaaggaggcaaaaattagaggaagcaatagattcggttccgataccggatataaaaaaaggttgtaacaacttgtgttacaacctttttttgtggaccagcctgggcttgaaccagggacctccagattatgagtctgttgctctaaccaactgagctacaagtccgatgtatccgtttactggatgcggtgacaaaagtagtattttctattgaaatatgcaagtcctaacaataaaaaactacaatactttctcttctcagaacttatatttgcgtttcgggttcttggggaaccagcctttttttacccggtcttcctgctcaaagacctctttgatggtccagaacgaggagaaggcaaatacccctaacagagaagacagaatgacattgtcgacgctcaacgatgccgcgacgcctgcaatgcctagtatcaggaatatccaccagcatttggtgccccaataatattcggcctttaccacaacagggtgaaaaaggccgataatcaaaaaggtacaaattccgataaataacccggcaaggtgatattcattcaggaattccattctgttatttttctacgcggataggaatttcttttttgatactctgttccagagaaatcagtgtttctgtagcaaccacacccggtatttcttgcattttgttattcagcaagtccatcaggtgttcgttgtcgcatgcgtagagtttggtcagcatggtgtaaggaccggtagtgaaatggcattccacaatttccggaatcttttgcaactcggccaccactgatttgtacatagaacctttttccagtttgattcccacgtatgtacaagttctgtaacccagtgatttcgggtttacatgatagcctgagcctacgatgacgcccaagtcgatcagtctttgtacgcgttgatggatagctgcacgtgacactccgcattcggctgctacgtctttgaaagggatgcgggcattctgtgaaataatctctagaatctgcctgtcgaggttgtctattttttccataataataaattataatttcctgttgttatcaaatagtaagcaaatatagagatttattttaattattcttcttttacgggaaaaaaaataggaaaaagcaaaaaaaaggagtgcaaagactttgcacccctttcctttttctatttagaaagatactttcttatttcttatctttttcgatacctaccagttcaacttcgaaaatcagagtagagaacggtttgatctgtcctgattctcttgaaccgtaagcgagttcttgcgggatgtaaagttcccatttagaacctacaggcatcatagtcagagcttctgtccagcctttgattacttggttggcacggaaagtagcaggctcgttacgtttgtaagagctgtcgaattctgtaccgtcgatcaaagtacctttatagttcactttcactttgcaagtgtcagcagggatttcacctttaccttcagtgattactttgtactgcaatccgctttcagtagttttcacaccttctttagctttgttttcagcaaggaatttttcaccggcagctttgttgtcagcgtatttttcttccatagctttcgctttgatagtttccatagctgtgcgagtatattcctgagcagcttccatagtcatcacgccacctttttccagtgtacctgcgatgaaaccagccatgaagttgtctttgctgatcgttttggtagagtcaccagcgaacagttcctggttgatacctttcatcatctggttgctgatctgctgaccgatctgaagacctgccatgtaagcgatgtctttcttgctggtcttgtttgcaccttcgttcaaacctttgatgaattctgccatatatgcagtatcaacgtccagacggcctgtcagatagcctttcagaccttgagtctgagccataccgatagagtaagacagtgagtcgatgtctgttttcagatttgctttaggagcttgagctgtacaagaagcaagacttgcagcagcggcgattgccataaaaatactaacttttttcattttgctttgaaattttttatttataatacttcgagtaattctacttcaaataccaatgtgctgtggggaggaatcatttctccggcacctctggcgccataagcaaggtcggacggaatatagagtttccatttggaaccttcgggcatcagttgcaatgcttccacccatcccgggattacctgattgacgccgaatacagccggttctccgcgcttgatagagctgtcgaacagtgtaccgtcgatcagtgtgccttcgtagtggcattttacctgatcggtagctttcgcttttttgcctgtgccttcgttgatcacttcgtattgcagtccgctgggcagcgtaaccacgcccggctttttcttattttcttcgaggaaagcttttccttgttcgatggcggcagcgcccatcttagcttccagttcttcgaaatacttgttcactatttcgcgggcttcctgatggctgatagccgtctgattaccttccaatacatctttaattgcttgtgcaaagtcatctacagcgatgccttttgcacccatgcttaataagttttgaccgattccgaggccaatagcgtaactgaatttatccatataatgtttttgttgaagatcgaagcatatcaccttcatggttttagctttcaatcaattgcaaatttatgaatcgcaaaagtacacgttttatttgaatgatttagcatttagtatttaaaaattcttatatccgtgaaagttagtctcttttctttaaggaattaattccttcattcctaagatttaatctttgtgttcttactgtttaagttcgtttatgctggaatttattcgtctgactatagttaaacttgcgtctgactacagttgaattatcgtctgactatagtcagacgaaagaattactatagtcagacgaatagattttagtatatccggcacgaagtcttcgtatggacggtattaaattcttgtataccttggattagattatgcgggcggaagttttcttttattcaatgattctgattacatttgtatatcttttaataataaggaggagcggttatgaagaatctggtagtattgacaggtgcgggcatgagtgccgagagtggaatcagtacatttcgcgatgcgggcggtttgtgggataaatatcctgtggagcaggtagctactcccgaaggataccagcgtgatccggcattggtgattaacttttataatgcacgaaggaaacaattgctggaagtgaagccgaatcgcggacatgaactgctggcggaactggaaaagaatttcaatgtggcggttatcacacagaatgtggataatctgcacgaacgggcaggaagcagccatatcattcacctgcatggtgagttgacaaaggtctgctccagcagagacccgtataaccctcattatataaaggaactgaagccggaagagtatgaagtaaaaatgggagataaggccggtgacggaactcagttgcgtccttttattgtctggttcggagaggcggtgccggagattgagacagctatccgatatgtagaaaaggcggatatattcgttatcatcggcacatcgctcaatgtatatcctgcggcaggtttgctgcattatgtaccgagaggagcagaggtgtatctgatagacccgaagccggtggacacacatacttcccgttcgatacatgtccttcggaaaggagcttctgaaggggtggaggaactgaaacaactgcttattccagctccgtagcaaagatatgactattccggagtgtttccgaaatctcgagtgcggtgatattgctgcactcgattcttaataccttctcccagtcctcgaaatctacattccatcgggtgatttgcgggaactttgccaggagacttccgatgagcttgatgtcgcgtctcttcgtgatggaggtccgaaaaattagaatctgattttccatgtctttttaggtgtttattcctgtgaacgaaattcacggatagtgatattgaaatgttgcttaaagttgcggctgaggagtgataaactgctgaaaccacagcgactggcaatttcggtcgcagacagttgcctgtcattctgtagtagcagtgctgctttttcaatccgggtgcgtttgatatattccgtcggtgtttcgcccgtcagaaacgtgaaaacgcgatgaaagtggaaaggagaaaagcacgcgattcctgccatcttatgcaatgatagaggttggtctatgttttgatgaatatattcggtcactttgtcgatccgtaatttatattcctgcctatttatttctttcgtttccattttaatgcaaaataaagaataataagagccggagagttgtcctatcttgccaacttctccggcacagataatgattatcttttttgtcctatatagaatacgtagccatagtaatctttatatttactatacaggcttcgttcgtactgctgacctttcatgaaatccatcgcagttttatttcccgcgtgttctttcatgaatgtctcccgtacttcatcttgtggggcaaaataatgttctgtccagcagttctccggtaggatgaaatgggctgttggagtatatccggccctttccatcttgtcaatacatgtcgggatcacgctgatttccggataggcgtccatccagaagtcttctatttccgcagggcgttccgaagtgaaccaggatgcttcgctcactgcgataaaaccgccttttttcaggtatttgctccattcgttcatcccacgttcgaatcctatattgtagattgctccttccgaccagatcaggtcgagttcctcgttctgaaacgggagattgtccattgatccggtgattccttttactctgtcggcgcaattggctttcaccgcattctcattgaatatttcgataaaatcgggaaagaggtctatgcccgtaatctgtcctttcacgtagtcagccagaaacagtgtctgaccgcctgtgccgcagccgatatcggcaatcttagcatcatcggtcagttcgttgatgaaacttacagctttgcgtgtggcttccggacttccgggaccttgacgtttcagcagcttgaagtagttacatatgaaagaaaaatcgaaatcatgtatagatgtattattgttactcattgtttttaatgttttaggtgtacgtcaaatggaggcatacgaggatgcataaaaccatttgagcctacaatagttgttattttttagaaaatagaaatcaactctgacatgaatatgccggagaaaatgtaagggataatctgtaatgagaggaagacttacagattatttacagaacgagatccttgcggaatgtaaatgtgattaacatccaattattctttttagtttgtggcaaagatatggttttaacctaaaaacaccattgatttttccttgaaaaaatactgtgggactgtattttagcaagaatcgtcaaatgaataaactgcatttcggctggaagggtataaattaaagagattcttaaccaataattatgttttttttgtatttttgctacccgcaatataattatgtgtaaaatgtggcgaagaacaataacctttctcttaagtcttttatctatggtgatggcggaagccactaatcattattttaagcatttgggagtatctgatggattatctcaggtgtgtatcccatcaatttatcaggatgagttaggggcagtctggctgggaactactgagggactgaatagatacaacggtaaggatgtaaaagtattccagccttcggaaagtaatcatggactgactaataatgagattaacgaattatgtggagataaaaacggaagaatgtatattcgttcgggaaacgatctgattaaactggatatttatacggagcaattcacttgtttgcgacagaaaggtgtgtatggactgttttgtaagaaagatacactttgggtgagttgtgcagacggcatttattattatacgggacagggtacagagctgacattctttgctcgtgtgcagaaaggttttgtggggagagcactctatgtagacaaagagactgtatgggtggttaccagaaaatacttggtcgcaatatcacgtgaagaccctcttcggcaagagattttacttacccttgataagggcaattgtattttaggcgatagttccggaaatatatgggtgggagcttggaacggcttgtaccgtatttctcccaatcgggagacaaccgcttatgttagtcattcgggaatgggtgaattatccgataatcaggtccgatgcgtgctggaagatgattttaagcatatttgggtaggtacgttcaagggaatcgattgttacgatccggttactgatacgtggagtcattatacgcgttatggaagttcttcaaattctttaagccatacttctattctctctcttcataaagatatgcaaggtaatatttgggtcgggacttattatggaggagtgaatgtattcaatcccgataagaataatcatagcttttattgtgccgaacctttacgtgaagactgtctcagctttccggtagtcggtaaaatgactgaagatagtgcaggaaatgtgtggatctgtactgaaggtggagggctgaattgttatcatggggatactggcgttttctcccgatatatgtatcataaaggagatcaggggacattagggagtaataatgtcaagtcgatcttttatagaaaggagaataatcgattgtatgcggggactcatttaggaggattgttcgttctggatttaaaatcgaacaaggggcacactctccatcatgttaccggtgaccctgcttcgttgcctcatgagattgtgaacgatattcaggagtataaggatggcattgcgatgttgacacaaggtggtccggtgttttttgatccggtgaccgagaaattctcaccgcttacggatgatccgtctgtccagaaattgatcagtcgggaatatgcttttgaaacgtttctgatcgatagccggcatcgtatgtggcttgctgttggtggcggagggatagtgtgcgtcaatttatcttcttcaaaagtgactcaatatatggcggatagtgagaaagacacgttgacggtaggaagatacaaaaccgtgcatatttttgaagataataaaggagatatttattttagtacgattggcgcggggatattcaagtatcaggagaaacaggatactttcaagtcttacggaactaccaatggagtacttccgagtaattattgttattatatctgcgagtctgcccgggataattgtctgcttgttttgcatgggaaagggctttctatctttgatcgtgaaaaagaggttacagaagagacttatcacttgtttcgtcagacttataatttggggtccgctttatatcgaagcaaaaatgggattatttatatcagtggtaccaatggattggctatgtttcaagagcggtccttttatgaatctcaggtcaaaagcttcttgaattttgataaattgtttattttcaatgacgaaatagctcctggtgatgagtccggcatcctgactgagatattggcgaaaacgtcggatatctttttaagctatcaacagaataacgtaacagtggaatttgctacttttaattataatagtgaccgtaatcgtttgtttgaatattatctggatggcttcgataaggtgtggacccagacttcgggcactacggttacttacaccaatctgcctcctggagactatacgctcaaagtccgttcgatggaaaataaggagagtttgaaagatgcaatctgcttgaatatacatgtttccgctcctttttatgctaccatatgggcatatctgttttatgtcctttgtctgactgcattgatggtcgcatttgttcgttttaaaacacggcaggcggctctgaggtcttcattggagtttgagcgaaaagaaaaagagaggattgaagaactcaatcaagtaaaattgcgcttctttactaatatttctcatgaatttcgtactccattaacgcttattctggggcaaattgaagtattgatgcaaatggatttgggcacaaccgtttataatcgtattcagcgtatatataaaaacgcctggcatatgcggaatttgatctccgagttgctcgattttcgcaaacaggagcagggttatttgaaactcagagttgaagaacagaatttggttacttttactcgtcagatttatatgtgtttttatgaatatgcacaaaaaaaggagatcacatatcgctttgattctgtagaggaaacgatttctgtctggtttgatccaatacagttacagaaagtgatttttaatttattgtcgaatgcttttaagtatacatccaataagggaaatataactgtagaagtaaggaaagttgcttcacaggccgtagtttcagtgtgtgatacgggtattgggattccggttgaacatatttcgaagatattcgaccggttctatcagacggataatgcctcttcttcctcttcttttactttggggacaggcatcggattggcgttggcaaaaggaattatgaatatgcatcatggaaagattgaggtagaaagtactgttggtgagggtactaagtttatcttgtctctacctttaggaaaccgacatttcagtgatgaagagatggctgtgacggaaggtcgggagtcactgattattccggaagcttctgtatcttcttatggacagttgatggcggaagagataaaagaacctgaatcgcagaaaaatatggatgaagaagataagcctacgattcttttggtagatgataataccgaactattgtccatgctggaagatatattcttaccgatgtataatgtatatactgcgtgtaatggacgcgaaggactggagatggcgcaacaaatacaaccggatctgatagtaagtgatgtgattatgcctgagatgtcaggtaaggacttgtgctataaaatcaagaccaatgtagaactttctcatatttctgtcgttctgttgacagcacagacttctgtggaatatgttgtagaaggtttgatgttcggagcggatgattatataacgaagccgtttaatataaaggtattggtggcccgttgcaataacttgataaaaaacaagaaacgtctgattgcacattatgcgggtaaggtcattacggaatctcctgtagcggaagctattaatgagaaagataaagaactgctgacgaaatgtgtaaatattgtcagagagaattttgagaaccctgattttgatgttactgcgcttgcttcagaattatgtatgggacgtagcaaattatatatgcagtttaaacaaatgaccgggttgactccgaatgagttcatcttgaaagtgaagctggatgaagctatgtctttgctgacagagcatccggaactaaatataacagagatttccgttcggctcggcttttcttctccccgttatttcagcaaatcctttaaagccttcttcgggattgctccgcaaggagtcaggagtaggaaggagtagttgtttcattacctgacttctcaagtattaatatccggcatatcagctattaatatccgacaattcagttgttaatacctgatatatcagctgttaatacctgacaaaccaggtattaatccccccaatgtctgcctataggttgctatacgttggataacatcatttgtgcagaaaaagaagggcgatgtatccaaatcttccattataggtgaccaaatcttccatgtggatgcagaaatgttctttttgcaaaatttgtgtttatggatgtcatataggtctcctatttttgcaatgctttcattctgttttaatacatagaatcaaagacaataaaataagtatgaaaaacacaataatttatcgcatgaaaagcagattaataacattactcttattattgattactgtcagttctgtaacgtttgctcaagaagcaaagaaggaaattcctttgaaatatggagctacgaatgaaggtaaacggcaagaccctgccatgcagaagttccgtgacaatcgtttgggtgccttcatccactggggactgtatgctatccccgggggagagtggaatggaaaagtatatggcggagctgccgaatggctgaaaagctgggcaaaagtacctgctgatgaatggctgaaactgatggatcaatggaaccctacgaaatttgatgcgaagaaatgggcaaagatggccaaagaaatgggtactaagtatgtcaagattacaacgaaacatcatgaaggcttctgtctgtggcctagtaagtatactaaatataccgtagcaaataccccatataagcgtgatatattgggcgagttggtgaaagcctataatgacgaaggaattgatgtacacttctatttctcagtgatggactggagtaatccggattatcgttatgatataaaatccaaagaagatagcatcgccttcagccgtttccttgaatttaccgacaatcaactgaaagaactggcaacacgttacccgaccgttaaggacttctggtttgatggtacgtgggatgccagcgttaaaaagaatggttggtggacagctcatgcagaacaaatgttgaaggaactcgttccgggtgttgccatcaatagccgcttacgtgctgatgacaaaggaaagcgacattttgatagcaatggtcgtctgatgggtgactacgaatccggctacgaacgccgcttgcccgatccggtgaaagatctcaaagttacacagtgggactgggaagcctgcatgactatacccgaaaatcaatggggatatcacaaagactggtcattgagctatgtgaaaactccgattgaagtcattgaccgcattgtacacgctgtttccatgggtggaaacatggttgtcaacttcgggcctcaggcagatggtgatttccgtcccgaagagaaagcaatggctacagcgattggtaagtggatgaatcgttacggaaaagctgtttatgcttgcgattatgccggatttgaaaaacaagactggggatattatacacgtggtaaaaacgatgaagtttatatggtagtattcaatcagccttatagtgaacggttgattgtaaagactccgaaaggcattacagtagaaaaagccactttgctgactaccggtgaagatatcactgttgttgagacaacccgcaatgaatataacgtatctgttcctaaaaagaatccgggtgaaccttatgtaattcagcttaaagttcgtgcagctaaaggaacaaaaagtatttatcgagatgctttaacataaatgataaagaaacgattctatgaagtttaaatatatactcattttatcagcgcttatcgggcagattctttcactctctgcccgggaagtgacctctttcaatgaaggatggctattcaaacgcgggcctttttcacaggacccggtgaaggtcgctgctcaatggaatgcggactgggaaactgtaaacttgcctcatacctggaacgctaaagatatgcaggtaaaagctgatgctttctatgaaggagttggttattacaggaaaacacaattctttggcaatgagttgaaagggaagcgtgtatttcttcgctttgaaggtgtgggcgccaacacagaagtgtatgtcaacggtaaacttgtcggaatgcaccggggagcatacagcgcctttgcttttgaaattggaaccgcattgaaactgggagctgagaatgagataatggtaaaggcggataatgcttcacgttctgatgtgattccggtaaatcacaatctttttggggtttacggaggtatctatcgtccggtatggctgattattactgaacagaataacattacagttaccgattgtgcctctccgggtgtatatattactcaaaggaatgtatcgaaacgctctgccgatatcacagtgaaagtgaagctggacaatggaagtcttactcctgctgacttggtactcgaaaataccatttatacgcagaatggcaagaaggtcacttcccatcgccttcctttggtactcactccgcagggaacacagacttacatttctaccttcaaactgaataaaccgcatctgtggcagggacgtaaggacccttatttatataaggttatttcccgcttactggcggacggaaaagtaattgatgaggtggtacagccattgggtgttcgtagatatgagattgtgccaggcaaaggtttctacttgaatggtgagaaatacccgatgtatggggtaacccgtcatcaggattggtggggattgggtagtgcgcttaccaacaaagaacatgattttgacttggctcagattatggatatcggagcgactactgtccgtttcgcccactatcaacagtcggattacctgtattcccgttgcgattctttgggattggtcatctgggcagagattccttttgtgaatcgggtgacaggatatgaagccgaaaatgcacagtctcagcttcgtgaactgattcgtcaaagtttcaatcacccttccatttatgtatggggattgcacaatgaagtataccagccccacgaatatacggcaggactgacacagactctgcataatctggccaagacagaggatcctgaccgctacactgtatctgtaaatggttatggccatgcagagcatccggtcaatcaaaatgcggatattcagggaatgaaccgctacttcggatggtatgagaaaaagttgcaggatatcgagccttgggtaaaagggctggaggagaaatacccgtggcagaaactgatgttgacggaatatggtgctgatgcaaatctggaccatcagacagaatatctgggtgatgctctgaactggggaaagtctttctatccggaaacttttcagaccaagacgcatgaataccaatggagtgtcattgcaaagcatccctatatcatcgcttcttatctttggaatatgtttgactttggtgtaccgatgtggagccgtggcggtgtacctgcccgtaacttgaaggggttgatcacttttgaccggaaaatcaaaaaggactcctattactggtataaagctaactggagcaaagatcccgtactctacctgacccagcgtcgcaacatcgaccgcgaacgaaaacatacttctgtcactgtttattctaacataggtacaccgcaagtgtatcttaatggaaaagaactgacgggtatacgccaaggctacacggatgtgcactatgtcttggctgatgtaaccttggaacaaggtaagaatacaattaaaaccgttgcaacatataatggaaaagaatacactgacgagattgaatggaactataccggcgaaaagaagcgaagtgccgattggagtgaaaacaaagaagagcacgcaggttggtaatcggagacgtttctgtatgtaatctgaaaaatgttgaatctaaaatataaaagcctatgaatgaaatgagaaagaatctcttttaaatggaaaacaagtatttatcattaactaatctaataatttatgaaaattgaaaagttttatttgtttctgctagcttgctttgtcgcgataggagcatattcgcaagatgggcaacagaaaatgactggtgatgaaaagagtcagcagcaaagtgatgcaaaagttaagattaccgggcaggtctttgatgagagcggtgaaggaatacctggagcgaatgttactcttaaaagtaatcccaccagtggaactgtcacagatctggatggtaagtttattttgatggcttctcctcaaaaggatgtgctggtagtcagctttattggatataacacacaagaatttccactgaaagggaaaacaaacgttaccatccaactctcacaaaacgtaaatgaactggatgcggtggaaattgtggcattcggaacacaaaagaaggagagtgtgattggttctatcactacactttcgccaaagagcctgagagtgccgagcagtaatatgacaactgcattggcaggtcaggtagccggtattatttcttatcagacatcaggagagccgggtgcggacgatgctagcttttttgtacgtggtatcgcatctttcggatttaacaccagtcctttgattctgattgataacattgaatctacaagtacggacttagggcgtttgaatcccgatgatatcgaaagtttttcaatcatgaaagatgccatggcaacggccctttacggttcgagaggagctaatggcgtcgttctagtaaagacaaaagagggagagagaggaaaaactaagtttgatgtaagaatagagggaagtaattctcgtccgaccagtaatattgagttggcagaccctgtcacttacatgaaattgcataatgaagccatcttaacacgtgatccttccgcccctgtcatgtatagtgatgataaaatagacagaaccgttccgggatctggttctatcatttatcctacaaatgactggagaaggcaactaatgaagaactcgacctggaatggaagagccaacatgagcatcagtggcggaggaaattcggctacgtattacgtgtctctgcgatataccaaagaccagggtttgctcaacgtagacggcaagaacaacttcaacaacaatatcaatcttcagacttatcagatgagggctaatgtcaacatcaatgtgacaaaaacgacccaggtaagagtaaacttaagtggaatctttgacacttatgaaggtcctatttattcgggatcggatatttataagatggtaatgaagtctaatcctgtactttttcccgctgtatatcctaccgatgaacaacataaatatatcaaacacattctttttggaaacagcgatgacggaagttatcttaacccgtatgctgaaatggtaaaaggatataaggaatatgagaatacgactcttcttgctacattaggtgttacgcaggacttgaactttatcactaaaggtttgaaatttgaaggtttcttcaacgtttctcgtaaatcatattacggtcagaccagacaatataagccatattactatgctttaagttcttatgatttcatgacagagaaatattctatcgaaaacatcaatcctgactccggaacggaataccttgattttagtcccggtgacaagactgtcaacaatgtaatgacaatcgaaacgagaaccagttataatcagactttcggtgatcattccgtaggtggtcttatcgttactcagtatatcgacagtaagaatccaaactacaaaactttgcaggagagcttgccttcaagaaatatgggtgtgtcgggacgttttacttatgcctatagtgaccgctatttcacggagttcaattttggatacaatgcttccgaacgctttgataagaaacacagatggggattctttccgtccgtcggtggtggctggatgatttcgaacgaaccattcttccaaccgctcagttcaaaaattacgaaattgaaactaagagcctcatacggtttggtgggaaatgataagattggcagagtcgatgaacgtttcttatatctgtctaatgtgaatatgaatgcaggtggagcatctttcgggtatgaaaacaaatatagcagaccgggcgtaaatgtttcacgttatgctaatcctgccattggatgggaaaaatcccgtaaagctaatttcgcattggaagcttctttctacggatttgacctgatagctgaatatttcacagaacatcgtactgacatattacagaaaagagccagtattccaagcgtaatgggatatcaggcagacgtatatgctaacattggcgagaccaaaggacacggtgtggatcttgatttaaagtatcaaaagaaccttaacaaaaacgcttttttgatagtacgcggaaacttaacctatgcgcatagtgaatatctgaaatatgaagataacacgtatgataaggaatggtggaaatacaaaataggctactcgcccaaccagaagtggggatacattgcggaagggctatttatagacgatgcggaagtggccaactctcctgtacagtttggtgattataaagccggagatatcaaataccgggatatgaatggagatggagtaattaattcattggatcaagttcctattggacatccgactagtccggaaatcaactatggctttggatcaacatttagctataaaggttttgacatcaatttccagttccacggctcggcgcagtcttctttctggattgattatgataagatgtctccattctttaaagatccggatatgaagcagaaaactaataatcaactagtgaaatttattgcaaatagctattggtcggaaagtaaccgcaatcgttatgcaacatggcccagattgtcaaccacttctgttgccaacaataaagaactgagtacatggttcatgagagacggttccttcttacgactgaaattggttgaactgggatatacagtacctcaaaaaattgtgagcaaatggggtatgtccaatctgaggctctatatgtcttctaccaatctttttgttttgagtaagttcaaggattgggatgtggaattggcaggtaatggtcttaattatccgttacaacgtgtattcaatattggtgtaaatgtaagtttctaaaaagaatggttatgaaaaaaatcaaaatatgtatattgtcatgtttgtcggtgtttatattgacatcatgtgaactgaatatcgtcccggataacataccgaccattgaagaccatgctttcgccttgagaaaagaagcggaaaaagtcttgtttacttgctacaggtatatgcctagtgacggaagtctcaaaaataatgtagctttgcttggtgccggtgatttttgtatttccgatgttttccggagctatttgggaaccagcgcctggtatatagcccaaggattgcaaaagtccgattcaccatattgtgctcaatggggacatttatatgagggaattgcttattgtaatattctgattgagaatatacatactacaccggatatggatgatagcgagaaaaacagatggatcggtgaagtggaatttttgaaagcttattatcatttctatctgatcaggatgtatggaccgattcctattatggatcgatatgttccggtaagtagtagtacggaggaaatgcatccttatcgggagacattggacagttgtttcaattatgtgacagaaactttggacaaggtgattgctaatccggatgttccggctaaaatagagaatgaagctgaagaactgggacgagtgaccgtaggtatggctaaagcattgaaagcgaaagttctggtaaccgctgcaagtccattgttcaatggaaatatggattatgaggtaattgcagataatagaggtgtgaaaatctttaatccggttaaaacggaagaggagaagaagcagaaatgggtaaaggctgccgaagcgtgtaaagaagccattacttatctcgaagatttgggattcggtttatattattttgatgatcccactgtggtcatgacagagtccgacaagctgatgatgaatttgcgaggtgctgtcactgagaagtggaacaaagaagtggtatgggcaaactctcagtcatgggtcggttcgggttcttatgacaactatcagatacaggcaatgccgcgtgacttggttcccggcagaaatgctaagaatgctacgaacagaaccaatctgggtgtttctcttggactgactaactcattttatactaaacatggggttcctatagaagaagataagacatgggattatgctaatagatttgaagtgcaggctcccacgccggtggaagctgagcccggatatgagaatactattatgctgaattataaaacgggaacagtcaaattgaatctggaacgtgaacacagatattatgccagcttaggctttgacggcggtatttggttcggacaaggaaagacgggactttcgggcttgtattcggtgaatgcgcgtaaaggaggaaatgtgtctcccattccggcagatcactctcagaacctgactggtatttggcctaagaaagtggttaactacaagacggtcatgtccgatgcggcttccggatttacatcggtcacttatccgttccctgttatccgtatggctgatttgtatttgatgtatgccgaagctttaaatgaaaaaggagaggattatgctacggtattgccatggatcgatatggtgagagaacgttcgggacttcaaggcgtaaaagaaagttgggaccaatatgtaggaaacagcaagtatgctactcagactggtctacgacaaatcatcatgcaggagcgtcgtattgagttagcatttgaaggacattatttttgggatgtccgtcggtggaaaactgcgacaacagaattgacacagccattgaccggttggaaagtccgttatggagaaactgatgtagattattatagtgagaacttagtgcttgtccgggatttcactcccaaaatgtatttctggcctattgatatcggtgagttgagaaaagatcctaacttagttcaaaattatggttggtaagtaattaaagtgacatttgatttatgaaaaagataatatacagtagccttttagtactagccatcacattgctgcctagtgcttgcgataacgatagtgatatgaattctccccatggaagtacgactccgcccgaacaggtagtattgaatggtgtcaaaaatctgccgggaaagtctataatctattttacacagcccagtgataagaattttctttatatgaaggctgtatatatgacagagataggagaacgttcgaccaatgcttcgtattttgccgattctgtagtggtggaaggatttgaaaaagccggtgaatataatgtgaagttgtattctgtaagtccgggtgaagcctattctgaacctctggaagtaaaaataaatccggaagagccgccttatattactgcttataaggagatggaaataaaaccggattttgccggtatccggataaagacatccaacaccagcaatgagactcttactttttatgtgtaccggaaagatgctactggaaaatggacggaagccggagctttatataccaaaaagcaagagattaatgagcccatacgtggcatggaagccgttccttcagaatttagtgtggtggtgaaggataggtggggacatctttctgaaagtaaggagatatctctgactccatattatgaagaggaagtagataagaaaaaaatgggatacttggctattggcgaatacaaaggttatctggcaccgaatgctaataccccaaagaatctgtatgacggaattattggaagcaataatactttcatgaccctcacaacggcgggatatgattttaccaagccgagttcggtgacactggacttagggaagaagtttaagctcagccgtatgattgtctatggaagaagaaatggaactgattattcatctatatttgacggtctgtatccgaaagaaatagaaatttggggacgaaatgataataatgtaaccaagtttgatccggaaaatgatgaaggatgggtgcggttatatcaaggagtattgcccagagccgacggttctgttattccggcggctattgtcccgttaactgatgctgataaggaactggcaagagacggcaatgaactcgaattttccgtagatctggatgcatatagatatgtgacgtttgtttgtatcaagaattataatgtaggaacatctcgtatcaatgtggcagaacttactttctttggaacaccggaggataaaataatacagtaattgctatataaaagacaaatattatgaagaaatttatatttatatcagtcagcatcttgatattttgttccattatatcttgcgagtcaatggatgcgacttataaggactttgttaaggatggtccaatcatgtatcttacacgattatcgaaagattcaataaccgtgcgtaatgggtgggaaagagtgttgatttcatttccgatagtgaaagacgggagatctacaaagattgctcttgcattgaatcaaagtgatactgtcagatatgagttggccaaaaataagaggacggatattcttttagagaatatgcgggaggggtctatcattttttccgcctggctggaagatgatgagttgaataaatcattggctacagactttacaggaaccatttatgggacacagtaccagagctatctgttaaatcgttccattgtttctaagagtatgcagagtggtaatctggtcatcaaatattccatgttgctggacagcacattagtggcatccaggctaacttggaacaagggaggagaagaaacaacaaaaatttcttattataataaggaaggacaggacgttttagaagattttacaggcgattcttttataatggaaaccttgtatgctccgcaggaaaacgtattggataaaatctggtcgaaacctgttaaatatacgaagtagcctgagtggtcggcctgattgtattttaaggatgagaaggtgtgtcaaaagtaactaagctctcctccttcaagaagggaatttagttacttttgacatacccccttattctccaaatgataaacatgcatatatgaaaatgatacattataaaatcataattctattattgctggcatggagtccttgggatttggttttaccttgcccctctatttgtacgtccgccttgcagaatgatgattttgatattctaatgaagaagattcgggatggggttgcagaaaatccgaatattgataaagctctgaaactgtatgatgatgtccaaggatattttatagatatagattatgcccgccgggatcgtactaactggatgccacttattcatgtggatcggttgtatgactttgtatttgcttatacccatccaaagaattcctattatcagaatgaagatttgtatcataagatagtaaagggcttggagtattggcatcatcgtaatccacattgtaataactggtggtataatcagattgccgagccgcaaaaactcggtgttctgcttattcagatgcgtgttggtaaaaggcagattccggaagtattggagacaaaggtcttgcaacgtatgcggaaggacggcggacatcctgccaaatggactggagccaaccggacagatatcgctttacactggatttatagagcttgcctccagaagaatgatgttgacttgaaaacggctgttgaaaatgtttatagtcctctatcatatactgtgaaagaaggatttcagcatgacaacagttattttcagcatggtgtgcagctttatatcggtggttatggagacgaaatactgaaaggagtaacacaggtagctttatataccaaaggaacgaaatatgcattggatgatgagagaatacaattcctaaggcattttatgtgcggcacttattatcaggttatacgtggacaatacatgcttttcgatgtattgggaagaggagtgagccgtaataatgctacccaaaagagtcatgccgccttgtttgccaaacgaatgctggagctcgacccggcgcatattgatgaatacaatgcgattatagccagattggaaggcaagaagtccgccaactatggaataaagccgttacacactcattatttcagaggagactatgctcttcatgtccgtccccactatacatttgacgttcgtatggtttccaatcgtaccatgcgatgcgaatatgggaatggtgaaaatctgaaaacctattttatgtccgacggatgtacaaacatcgtgaccgaaggggacgagtacgcccgcatctttccggtatggaactggaatcgtattcctggagtgactgctcctcaactggataccattccacgaactgtaattgattggcaaacgaagggaacttccgtatttgcaggaggagtctctgatagtctttatggcgtatctgtttattcatatcttgatacctatgctgatataaataccgcagctaaaaagtcctggttctttttcgatgatgaaatcatttgtttgggagcgggggttaattcgacagccggtgtaccggtatgtactactatcaatcaatgtttgctttcgaaaaaggaggtcatattgtcacaaagtaagaagcagtcgatggtgaaagaaggagatttcgtctatgattctcccgaatgggtattgcacaatggaattggttatgtctttcccgccggcggaaatctctttttgagcaagaagatacagacgggatcgtggtacagcattaatcatactgaatctaaaaatgagcagcagcaagaggtctttactttgggatttaatcatggttgtaatccccggaatgctacctatgcctatatcgtggtgcctgggattcattctgcccgcaagatgaataactacaggaagagtcccgtcgaaattctggcgaatacggattctatgcagatagtgaggcatacgaaattgggaatatggcaaatggtattttataaagagggtacattccgtaacggagagctttctgtaagtgtggataaagcctgtgcattgatgattaaggatggacacagtggtaatgccgaactgcatattgctgatcctgggcagacacaatcttgtattaaagttgaattgctgattcctgaaatatccagcgagcgaaagactgttttatgtgattttagaaataccggtatctatgccggtgcatccaaagcatataaattaaaaaatatattatgaagaaattacttttgattctttttctaagcatagcttatttatgcacgacacatgcacaatcgtttactaaactcgaagtgaagcaatcgatgcgtagggtagccgattggcagatcggtcattacaacagagctgtttatggtgatctcaactgggtgaatgccacctttttcctgggacttgcttattgggcagagatcgccgagaaggacgatcaggatgacttctattataaatggctgacccgcctgggaagtcgtaactattggcaggtagataaacggatgtatcatgcagatgatatttgtattgctcaaacctatctgtatctgtacgaaaagtacaagcaaaaggacatgattgttcctactctggcgcgtacggagtgggtggtcgccaatcctccttcgggttcgtttcagttgacttacggagatgccacgacattagaacactggacttggtgtgatgctcttttcatggcaccccccgtttatctgaaactctataatatcactggtgataagaaattcattcgctttatggataaagagtacaaagcgacttacgagttcctgttcgataaagaagaaaatctcttctaccgtgaccaccgttattttgatatgaaagagagtaatggtgccaaagtcttttggggacggggcaatggctgggtgcttggcggactggtagaaatgctacgtgaactgcctgccaagagcaaatatcgtccgttctatcaggaactgtttcagaaactctgttaccgcatcgctaatttacagagcagcgacgggttctggcgtgcaagtctgctcgatccggacgcttatccatcaccagaaacaagctgtagcggtttcttcgtatatgcccttgcctatggactgaacgagggacttttaccaaaggaaaagttcctgcctgtagtagagaaaggatggaaagcactgctttctgcggtagaagaagacggtaaactaggatatgtacaacctatcggtgccgacccaaagaaagtgacccgcaatatgacagaagtatacggaccgggtgctttcctgcttgccggaacggaaatgtatcgtatggcagaagacgctccgaaacagaatgctactatcccgcagaaccgtattcaggaaattgcagctatgcttcccgatcgaccgcaggggataggaacgtcttataaggacaggactttctggaataagataaaagagagtgacgacgctaaacaacttctggaaaaggaagctcctgctttgttaaagcaggggatgcccccttttgtcgattcactgtacctgcatttgaataagacgaacgttcgtttgcctggagagaatatgatgaatgcccgttatcaatatctgtacaggctgactttggctgaatgccttgaaaataagaggcgttatgtccctgccatcgaaaaagctctggtggctctttgcagtcagaagccttggtctattcctgcccacgaccgcggtctgaagaattataaaggaacggattattatgtagacttggtggttgctactgccggaaacggtattgctcagtgtgttaccatgctggacgatcgtctgtcgccggaggtaagggcacgggtgcagtgtgctttccgtgagaaggttttccgtccggtctaccgttgtctggaagagacaaaaccattttggtggttcaccgctaccaataactggaactctgtgtgtctggcgggtgttaccggtgcggctcttgccttgttgcccgataaggaggaacgtgcttactttgttgcggcagccgaaaagtataacgtgtatggaatgaaggggtacgctgacgacggctactgtagtgaaggtgtaggttattataattatggtttctgtgcctacattctgttgcgtgaagaagtataccgggcaacgcagggaaagatcgacttctttcagactcccaagtttgtccgtatcgcccggtatgggaagaagatacagatgaatgaaggagtgtgccccgcctattcggattgtcgcatcgggttgtcgccggacaagtttattctcagttactgcgaccgggcgctgggtattacttctgcagaagaacagcctgttttacccaaaggaaacaacttgtccctttaccttctcgaacttttcacaagtcaggttgcaaaggttggaatgacagacggaatccgtcaggtattgcaggaagagtcggatgctttgcgcgcttattatgagcaggcaggtattttgattgctcgtcctgccggtggaacttcctgtcgtctggccatatcagccaagggcggaaccaatgcggagaatcataaccacaatgatgtcggttcttatgccgtagctttgggaagtgaaacgatggttggcgatcagggtggtccgaactcctatcccggtgattactttaacggagacgctcctcagaaatataagataaaaggatcattcggtcatccggttcctgtagtagacggacgaacacagtcctcgggtggcaaagcgaaaggcgttgtgctacagaaagaatttacgaacgaaaaagatgtattcagtattgactatacctctgcctattccacccccaatttggataagctcattcgtactttcgtttacgaccgccagggtgaaggcaactttacagttggcgatgaatttacagcgaaaacaccgatccgattcgaaacagccataacgacacgagccgactggaaaatcctggacgatacacatcttctgctggctactgattccgaacagatgattgtagctattgaggcatccggtaaagtggcgtttacttccgaaacgattgaagtgaactctccggcatatacacgtatcgggattgcattgaaaaatcagtcgaaggaaggatatatccgattgaagatgtacacaaaataagtctgtgtattagatatatgaagtatttatagggcatatatgcccagcgtgcaggacatatatgtccaacgtgcaggagatagttaccctgcacattggctatatatgtcctgcaatcagattatagttgccctgcaaacgggggaagaagatactatctttatcttcttgtttttattcttgctactttcgcttaaactgtctatttttgaggctgcatttccatacttgaatacgagtacctcattattaatagaataaaacaatgaaaaacaggtttctgatcatatgcacagttttgtttctctcctcttgtttggcgtatggacaagagcaagcatctgtaacaaaagacttttctgaaaataaacaaggttgtattcagcatccctggcaaggcaagaaagtaggatacatcggagattccatcacagacccgaattgctacgctgataatataaagaagtactgggactttctgaaagaatggctggggatcactccttttgtttacggcattagtggaaggcagtgggatgatgtaccccgtcaggcggaaaagctgaagaaagaacatggcggagaagtcgatgctatcctggtttttatggggacaaacgattataatagtagtgtgcctatcggtgagtggtttacggaacaagaagagcaagtgctgtctgctcacggtgagatgaagaagatggtgacgcggaaaaagcgtacgcctgtcatgactcaagacacttatagaggtcgtattaatataggaatcactcaactgaagaaacttttcccggataagcagatcgttctgctgactcctttgcatcgttcgttggctaacttcggcgataagaatgtccagccggatgaaagctatcagaatggttgcggagaatatatagatgcttatgtgcaggctattaaggaggcaggaaatatatggggaatacctgtcatagactttaatgcagtgacaggtatgaatccgatggttgaagaacagcttatttatttctatgatgccggctatgaccgtttgcatcccgacaccaaagggcaggagcgtatggcacgcactttgatgtatcagttacttgcactgcctgtcgctttttaattattcaaatatccgcaggacttgacaaaggcatttttttgttgtatatttgcaggagtcatacaggcaataaagtaacaacccattaaaaaatgaaacgaaatgcaccttatcaatcatcttaaccgaaccgaaaaaaatagtgtaacattataacaaaacacaaaggggatcatatgcaaatcagcatctatgtgaaccggtgataagcttgaggctgcaactttttatacggtttgcagccttttttgttgcataaaatcaagaaatacgtgcttaaaaggtgtattggagtttataataaatggggagaccgtttataataaacgatgcaactatttattataaactcaactgcgattttagtattgatggtaaaaagttttctatatgtcagaagaacccgtagagagttctcttttatttgacttagcagactgcgaattatcgtaacatgacaatcttttactttattgcccgatttaccccctatatctgcccgatttacctcccgtctcattgcgttcttctccctatttttgtgcattaaatattcttatttttatcaatgatgaaagatgctgcatgatatgcacgacggagatggaaagtgcgtggctgttctgcgggatgttgttttgaagaaaaatagtacaatattccatgcttgttgtactattctccataggaatatagatagttaatcgtaaatttgtaatttaattgtgccttatactttttataagcatttatagaagaatatcatgaaatactggatgttattgtttgcccttttgtgggtatcttacggaacgggcatggcccggaaaacggaaaaagtagtaaataacggaattccctggtttgacgacaggggagagatagtcaatgcccacggtgcctgcattgtggaagagaatggcagatattatcttttcggggaatataagtcggacaagagcaatgcttttccgggtttcagttgttattcatctgatgatttggtgaactggaagttcgaacgtgttgtactgccgatgcagtcaagcggaattcttggccctgatcgtgtaggcgagcgtgtgaaagtcatgaaatgcccttctaccggcgagtatgtgatgtatatgcatgcagacgatatgaactataaagatccccatatcggttatgctacctgtagcactatagcaggtgaatataaacttcacggacctctgttgtatgaaggtaagcctattcgccgctgggatatggggacttatcaggacacggacggtaccggatatctgctgttgcacggaggaattgtctatcgtttgagtaaggactaccgtacggcagaggaaaaagtggtatcgggagtaggtggttctcacggagagtctccggcaatgtttaaaaaggacggcacgtatttcttcttgttctccaatctgaccagttgggagaagaatgataatttctactttacagccccttccgtcaaagggccgtggaccagacaaggtttgtttgctcccgaaggaagcctgacctataattcacagaccacttttgtgtttcctttaaagtgtggtgaagatacgattcctatgtttatgggcgatcgctggtcttatccgcatcaggcttcggctgccacctatgtgtggatgcctatgcaggtggatggaacaaagctttctattccggaatactggccttcctgggacgttgataagttgaaacccgtaaatcctctgcgcaaaggaaaaaccgtcgatttaaagaagataacgttcagtaaagaagctgactggaaagtggaggaaggaagaatatcttccaatgtaaaaggaagtacgctgagcattcctttcactggctcttgtgtggctgttatgggcgaaacgaactgtcatagcggatatgcgcgtatgaatatccttgataagaaaggggagaaaatatattcttcactggtcgatttctatagtaaggcgaatgatcatgcaacgcgttttaagactccccaattggctgaaggggaatatacgctggtgattgaagttacgggcatcagccccacatggactgataaaacgaagagaatctatggcagcgacgattgctttgtgaccattactgatattgtaaaactgtaatatttatgagaaatagaattttattttctttccttgcttgggtagcagtgatcgtgtccgttcagggtaaacaaaaagattttgttttgcagtcaggtcggccggttgcgatagcttgcagcggttcggaagcaccggtggtgcgtacttcgctggacttgttgtcccgtgaccttcagactgtattgtcggcaactgcccatatagacataaacaccggaaacatcctggtaggaacgatcggacagagcaagctgattgagcaggcaggcatcgatatttccgcattaaaaaacaaaaagcaggctttcatgctcgccgtctcagaagatggaaagctagtagtagccggcagcgacagtcacggtacagcctacggcatacttgaaatatcccgtctgctgggcgtttccccttgggaatggtgggcagatgtgactccggagaagaaagagacatttcgtctttcgggcaagtttagagagttgcagtctccttctgtggagtatcggggcatctttattaatgatgaagattggggactgatgccttggagtaacaagacttacgaaccgtcggatgtgaaaggagaaatcgggccgcgtaccaacgaacgtatttttgaattgctgcttcgtttgcgggccaatacctactggcctgctatgcatgagtgtaccttgcctttctttctgacgaagggcaatcgggaagcagcgaaaaagtatggcatctttatgggagcttcccactgcgaaccaatggcgtgcaatgctgccggagaatggaaaatacgtggaaaaggagcatacgattacgtgaataacagtccggccgtttatcagttttgggaaaatcgtgtgaaagaagttgccggacaagagatactttacacgctgggtatgcgtggcgttcacgatggaaagatgcagggagccaagacggtagaagaacagaaagccgtcctgaaccgggtatttgttgaccagcgcggcttgctcgaaaagtacgtgaataaagacgtaacacaagtgccgcaggtctttattccttataaggaagtgctcgatatttatcatgcgggactgcaagtgcccgaagacgtgaccttgatgtggtgtgatgataactacggctatatccgtcatttccccactgccgaagagcgtgcccgtaaaggcggcaacggagtctattatcatgtttcctactggggacgcccgcacgatcatttatggttgagcaccatgagtccatcgctcatttatcaacagatgaagcaggcttacgatcagggaatacagaaaatgtggatactgaacgtcggagacatcaaacctgccgagtatcagatagaactgttcatggatatggcatggaatctggataaggtatcttccgaaggagtaaccgcacatctgaaacattggctggaacgggaactgggaacctcctgtgcaaagaccatcctccccgttatgcaggaacattatcgcttggcacatatccgcaaacccgaatttatgggaaatacacgggaggaagaaaagaatccggtctatcgggtagtcaaagacttaccgtggagcgaaagagagataaacgaacgtctgaatgcttacagcgaactttcggaaacagtagagaaagctgcttctaaagtacccgtcgacagacagagcgcttacttcgaactggtgaaatatcccgtacaggctgcgacacaaatgaatcgcaaactgttatacgcccaattggcacgccacgataaggaagactgggaaaagagtgatgccgcttacgacagcattgctgcactgactcaacattataactcattggagaatgggaaatggaatcgcatgatggacttcaaaccccgcaagctccctgtattcaaccgtgtggaaagaaatgcggctactgctccgatgacagcggaccgtaaagcagcctgtcaatggaatggggcggaggcaaagaagggcaacgctattgtctgcgaaggtttgggatatgaaggcaaagccgcagagataagaaaaggcgatgcgctgactttctctttcggtaatctgaaaacggactcggtagaggtggatatccggttacttcccaatcatccggtgcatggcgataagttgcgtttctcggtttctctgaatggtgccgagcctgaagtgatagcgtacgaaacgaaggggcgcagcgaggaatggaaagagaacgtgcttcgtaatcaggcaatccggaaaatcgtacttcccgttctgggcaggaaatcacatcaattggtcatcaaggcattggatgagggagtgatactggatcaggtaatgctttatgaggtgaattagatataattctatattttatagtttcagactggctgggtcagtcagtctgaaatacactgtttattgtcccggcttgataatcaaccgcagtacaaaccaagcgtgatgtgctgcggtacttatccatccataatgttttgccataatgcggaaccgttctttaagagaagccttccggttctgcgtagtcattccttcatccagatagtcgatgattgtcaggtgcgtattgtgcagggtacgcgcctttttcatgatgcggatgcaccagtcgaaatcagcggagtaccggtagtttaagtcataaggttccatcagcgtatgtctggcaaagaaagcctgatggcagactaacattccttgtttgaaactcttccagtccagctttttgggcgtggaaaggcggcgcatatgcagaaagtgcctgtctttgtcaacaatcgcagtttccccgtagatgacgtcggggagaacgctcccatgaatgctgtgcaccatttgctgcaaagtatcgtcttcgtgaaagcagtcgcccgcattcagaaaacagagatagtcgccgctggcaagggaaatcgccttgttcatggcatcgtacaatcctttgtccggttcgctgacgacggtagttatccgtggacggtatctgtcgatgatagagagagtaccgtctttggaggccccgtccacgatgatgtattctacgtggtggtaagtctgcgagataacactttggatggtatcttccagtactttctcggcattgtaggtcaccgtgataatcgagaacttgggagtaggatggacactatgcatatttccctgttattttgttgtaaacgtccgtgtacttcttcgctatgatactttccgaatagttgcctatggccttgcggcaggcttgtgcggagagttccgcatattcgggttccgtcagtacccaatggatgccgttggccagatcttcggaagacttgcgctgagctacgtatccgttgtgcagatgatcgatcatttccggtatgcctccggtgttgaaaccgacgcagggcacaccgcaggacattgcttccatcaccatattcggcagattctcttcgagagaagggatggcgaagaggtctacggcattgtatatatccaccaactcatgctcattcttaatataaggaagcggatagacgcggaaaggaatcaggtcttgcaactgctgcgactggttgccgaaaacaaccacgcccaatgagtctttccattccggatgtttctctgccagcagtttgcaggcttcaatcagatagtcgataccctttcgcttgtctgtgatcttgacagaaccgaaaagaatgagcttcccttcctgcggcagcctgcattttctgcgggcttcctgcttattgtgaggcttgaacagattcgtgttgatggcgttcgggatactgataaccgtttgtccggtgagcagtccgctgactttggccttctccgccagccagcggctacagcctacaaacgtgatggatgcctgactataaatctcttttttcttccggaagattcgggtggataagtccttcttgcctcctcctccgtagatgtaagggcagtgatggcactcctgttcgtaactcttgcattcgcgtgcataatggcagatgccggtgcagggccacatatcgtgcatggtccatactacaggtttgccggaagtcagaatcttgcggatggtgttgagcgacagcattccttggttgatccagtgcagatggatgacatctgcctgctgaaattcgggaagcgaagtgatgtccgtgccggtattggcgatatctacggcgaagagatcattcttcttgaaacggttggctttccagatgacgatgcgttcccacatgaatttccatacgtgcagccagctgccctttagtccgacgacgctgatttggtctgtttgtttgtcacgtaccaacattttcgccttgatgccgttgttcttaagcgattccatcagtcgtccggcagcgacagccgcaccacctattcgttcggaagtattgatgattagtaccctcatgctttcaaaatgtttgcacaaaagtagtggttttcagtgaaaatccgtacaaagtcacatattatttgtacttttgccacacttattaataaggagatattgaacatgaaaaaggttgtgtttttaggattagggtatatcggccttcctacggcagccgttgctgccgctcacggtttcgaagtcataggagtagatgtcaatccttctgtggtggaaacgatcaaccagggaaagatacatattgtagaacctgaactgggtcaggtagtcagggacgtagtgcagagtggaaagttacgggcagtatgcaagccggaagcggcggatgctttctttatcgtagtgcctaccccattcaagcagaaccatcgggcggacatcacctatgtggaggcggccacccgttccgtgatcccttatctgcaggagggtaacctgtttgtcatcgaatccacttctccggtatataccaccgaacgtatggcggaagtgatctataaagaacgtcccgaactgaaagggaagatacatatcgcttattgtcccgaacgcgtattgccgggaaatacattatacgaactggtgcacaacgatcgcgtgataggcggcatcgatccggcatccaccgaaaaagccattgagttttattccgctttcgtacaaggcaaactgcacggcaccaatgcccgcacggcagagatgtgcaaactgacggagaactcctcccgcgactcacagatcgcctttgccaacgaactctccatgatctgcgacaaagccggaatcaatgtatgggaactgatcgaacttgccaacaagcatccgcgtgtgaatatccttcaaccgggctgcggagtaggcggtcactgcattgcggtagacccttggttcatcgtatccgactatccggaacaggcgcagctcattaagcgtgcccgtgaaacgaacgattacaaagcggactggtgtgcgaacaaagtattggaaacctgtcagaagtttgtggaacagaacgagcacgaaccggtcgttgcctgcatgggactggctttcaaaccgaatatcgatgacttacgggaatctcccgccaaatatatcgcttcccgcatcatctccgaatcgagagcggacgtgctgattatcgagcctaatataagcactcataagagcttccatctgacagattatcgggaagcatacgagaaagcggatattatcgtctggctggttcgccacgatgtcttccttgcattgcccaaagaagaaggaaagatagaactggacttctgcggcgtgagacgataaaatgtagtttaattgcgaagaggttgtatagactctattaaataaagcagatgaaaaagatattgctcgttttcggtacccgtcccgaagcgataaagatggctccgcttgtaaaggcgctccagaaagatacggaacattttgagacacgtgtctgcgttacggcacagcaccggcagatgttggatcaggtattggaagtgttcggcatcactcccgaatatgacctgaatatcatggctcccaatcaggacttgtatgacattaccgctaaggtactccttggactgcgcgaagtgctgaaggacttccgtcccgataccgtattggtgcatggagatacgactacctcgatggcggcatcccttgcggcattctatatgcagatacctgtggggcacgtggaagccgggttgcgtacctataatatgttgtctccctggccggaagaaatgaaccgtcaggtgacagaccgtatctgcacttactactttgcaccgacggaacagtcaagggcaaatctgctgcaagagaatgtagatgcgaagaaaatctttattaccggaaatacggtgatcgatgccctgctgatggcggtcgatatcatttccaccaccgccggtgtgaaagaaaagatggcgaaggaacttcaggagaaaggctacacggtaggtgatcgtgagtatatcctcgtcaccggacatcgtcgcgagaacttcggagatggtttcctgcatatctgcaaagcgatcaaagaactggcggctcttcacccggaaatggacattgtctatcccgttcatctgaatcctaatgtgcagaagccagtgtatgaactgctttccggtctgagcaatgtctatctgatctctcctctggattacctgcccttcatctatgccatgcaacattctactctgctgctgacggatagcggcggtgtgcaggaagaagccccttcattgggcaaacccgtgctggtgatgcgggatacgaccgagcgtccggaagctgttgaggcgggtacggtgaagctggtcggcacgaatgcggaggcaattgtcagtaatgtcactgccctgctccttgataaagaaatgtataagcggatgtccgaaacgcataacccttacggtgacggacaggcttgcgaaagaatcatagctgcgctcagatgttaacacatgagtagtcaggtattaacatttgatatgataggtattaatatctgagaagttaggtattaatacttgagaagctggttagcaatgcttgctgtgacatctaataatgcttgaaacgagatctaagaagcattgttaatcacatacacttcccactattattgtttttttattattggtttattttactatcataagtgccgatatataaagtaatatatggcgaaccttttctgcttttgccccatttttccgctttcatcgctttcaccttatagaaagacatttcactttatccgcatataacatacaaacctccataattctgttattatgaactattcgtatattgtcatatcagtcggtttattaggcagtaacaatttcaatatattccaaagcaattaatagactgttatcaagctgagatatgaaatttctaaaaagaaatatcagtgctgtatgaaaggaggatattatcgtactttttgatagtgtttattcgctataaatggttttattttgtagtgtcatttttagaaagccgctctattacaaaatagggatgaatgctgagaaggtgctttgtctgccggtgcacgtgggtttgaaagatgatgaaattaatcaaatttgcatggtcttggctgaatatcgtcgaaaatagaaaagtgtaaaatggtaataatcgggagtaaaggatgtgctaaggagattttgacagcactcaagtgggataatgtagaagaaactgtatctttgtttgacaatataaatacagatattagcgatgcatattatgactttcccattattaaatcctggaatgaactggagcaacatctgaaaacagacagtaaggttattattggtgtcggaggtggacagcgtagagaggtactggcacgaaagattgcctgtcttggaggagtattgaccacttttatctcccaaaaagcccttgtgggcgggtatgacaatactatcgaaccaggtgttgtgattctttcgggggcaactattacttgtaatgtaagtatagggcaggggacatttatcaataaaagcactgttatcagtcatgacgtccgtattggacgatattgtgaagtatctcccggtgcaaaaatcttgggacgtgccattatcggtgacaggacggagataggtgctaatgcggtaatacttcctgatgtcattgtcggtgctgactgcaaaataggtgcaggcgctgtagtgacgcgaaatatcgacagccatactactgttgccggagttcctgcccgttcaattacaaaaagtagtaataatgctttcaagttaaagtcaaagataagaaatttattgtaccatatacgaattgcagattttcgaaagctgagagaatataatcattacgtattcggaaaaaggaaactgatgttccttgagctattgtcacatagttggatgtacggtgcatcattcgaaaactactacgagttgcagttctttaagaaaagcagaacagaatgtcggcagtatctcacttcttcgttacgtcatgaattgacacgtcaagtaaacgatccctgtgaagcgttagtgttaaaagataaagtgcgttttgccgaagtttttgaggatattctagggcgccgggtaatgacgtttgatgagataaaaaggcaaatgcatgatccttactccatatccataaatgaggtcgtcattaaacccataaaaggacaagccggtcaagggattatttttccgatgcaaaactttacatcattgcgacaactacatgactatgttatttctactgtaaaaaagccggatgaatatttgtacgaagaacgtattatccaacatagcgccctgaataaactgaatccgtcaagtctcaacacattgagaattgtgacatattatgatgaaagtataaataaggtcgatgtgtggagtgttgttttacgtataggaataaaggcttgcacagacaactttgctacaggaggaattgccgcccttgttgatcattggggtgtcgtctgtcaacctgctataataaaacatccgtcaggagaacggtttcatatacatcctgtcagtggtgaaaaaataacaggttgcataatcccatattacgatcaggcaatagcattagccaaacaagctgctatgagaattccgaaagtgagaagtatcggatgggatgttgcgataaccgaaaccggtccttatatgttggaaggaaacgataattggtgtatgactttatttcagttgcccggcggagaagggttgcggcatttggccaattcggtttgcaatatgttttctgtttatgaataacatacaggctataatgcacattagggatgtattttccgtttctggtctgttattgattcaaatcgggcatgcctctaacgaaaaacgggctgtcagagaatcacttctccggcagcccttcttcattaggatcaaaaaaacagaggaagtatgatattctttattcctgacctccccctaaagcacggtataggttaattaaactttgtatctcggtaaaatgattggccgtttgtgacagttgtgcgctgagcaatgactgtcgggcggtaagtacttccagataggttgtattcgtatgttccatcagcagggaagtacttcgcagggccgtttgcagggaagtgacctgcttgtccagcaacagccttttcccctgactggtctgataggcagtcagcgcatcattcacttcgctgccggcgttgagcaatgtttgctgaaagccgagagccgcttcttcctgctgcgcacgggcgatacgatactgagccaccacctgccctttattaaagagcggctgcgtgagcgaacctactgccgatgccaggaacttgcccggattgagaatcatagacccgatggagttcgtccatccggcacttccgcttaaagtaatggaaggatagaaagccgaacgtgccgcattggtgccatagaacgctgcttccagtgtccgctcggccgagcggacatcggggcgggcggcaagcatccggacagggattcctacggcaaagtccgtaggaaactgttggtctgccaacgttccgcgttcgtagttgcggggcgtctctgccaataataaagcaagactgttctccacctgattgatctgctgctgcaaatcgagcacagaaccctgtacctgataataagtcgcttccatctgcgatacagccgattcgttcgccagtccggcgttcatcagggaacgggtagaggctacggtttctttccatgcctcctccgtctgtcgggagatgatgagctgttcgtccagcatcagcagcgtgtaataagtattggctataccggctatcagctgcgtgcggactgcttgacggtaatcttcactttgtgcatacagcgctttcgcctgcttcttggagttgcgcatacggccgaatacgtccagttcccaactggcggtaacgggtagcgaataaccctgcgtagctttgttcgtatcgaagctgctcactgtcccctgcggggaaagcgcaaaggcgggcaggaaagcaagtttggcggacatcagcactgcctgagcttcttctacacaaagctgggcggactggtagtcggtattggtccgcaaccctgtctcgatgagggactgcagatgagggtcggtgaagagttcccgccagtccatattccccagaccggcagtgtcttccgtcaccacttccccgccgtaaagatcgtcggggacggaagtggcgggcttgtatttggtatagatgccacaaccgctcagcgtcagactcatggcaactaacaggatgatatttttcttcattctttcttttatttattaacgttcacgttcagcttcacttttctctttttctaaaagcacttgtacatctgcttcttcttccatcggtttgcggattttctcctgcaagtactcaaagatgatgtagaagaccggaacgacaaagagcaatgccaccgttccgacagccataccgcctacgacacccgtacccagcgaactgttgccattagcacccgcaccggaagagaacatcagcagaagcataccgaagatcattgtcagcaccgtcatcaggataggacgcaggcggacttgtgcggcagagtaggccgattctacgatgcccatccctttgcggcggcgttcgatggcgtactccgtaatcagaatagccgtcttggccagcaagccgatcagcatgatcacacccgtctgcaaatagatgttattctccagtccgagtatcttggcgaacaggaacgagcccatcaatccgaacggtacggagaagataacggcaaacggtacgaggaaactttcgtagagacaagccagaatcagatagatcaggaagatgcagatggcgtagatgaaaaccgtctgcgcaccaccgctgcttgcttcttcgcgtgccataccgccatattcgtatccgtagcctatcggaagcgattctgcggccacttcttcaatcactttctgcacttcacccgaagagtaaccgtcggcaggattcacattggctgtgatggtgctgtagagattgaaacggttggccgtttccggtcccagtacctgcttcagtgtaacgaactggctcaccggagccatttccgtaccgttgcgcacaaacatattgttcaatgcctgctcgtccagacgatattcgggcgatgcctgcatcattacacgatataccttaccgtattggttgtagttggagatatatgctccaccgcaataactgcctaccgcatcgagtaccgcgcttggcgaaattcctgcacgcttacatttggcggcatccacttctaccgagagctgcgggaagttgatggcgtaggatgtataagccatagccacttccgggcgctggttcaaggcattgaggaactgtgtggacgcgtcatagaacgtagcaagatcaccgcctgtcatatcctgaaggttcagttcgagggagttacccataccgtatcccggaatcatggcgggctggaaactgaatatctgcgcttccttgatggactggaattgtgcgttgaggcgggaagctacggcatccgaaccgtgttcctttccttttcgttcgctccagtctttcaggcggacaatgatcgtaccgtaagaagttccctgaccggagatcagaccgtatcctgctacgcgggcgtagtgttctatttcgggcgtatctttcagaatgttttccagccggtccattactttcgtcgtctcttcgagcgtgcttcccggtgagatgctgacattcaccatgataacaccctggtcttcctgcggcacgagtcccgtcttggtcgtgctcatcagataaaccagcaggacgatggtagcagccagtgaagtccataccatccagcgatggcggatgaagtacatcacccctttcttatacttgcccagcacggcattgaacgaagcgttgtaagctgcgcgtacccgtccgttgatactcttggcgctcttggttccgtccgacggacgcatcatgatggcgcacagggctggacacagggtcagagccgagatcatggagatacctacggcagttgccatcgtgataccgaattgggtatagaacacgcccgaagtacctcccatgaaggtgacggggataaatacggccatgaagacacaggtacaggagacgatagccatcgtcacgtcgcccatcgcatctttggtggcaaggtagggcgacttgtatccggcatcaaacttggactgcaccgcttctactactacaatggcatcatccaccaccgtaccgatggcaagcaccagggcaaacagggtcaggatgttcagactgaatcccgcagctaccaaacaggcaaacgtacctaccagtgacacgatgatggagatggacgggatgagcgtactcttcaggtcctgcaagaagaagtataccacgaggatgaccagaatgatggcgataatcagtgtttccaccacgttgtgtatggaagcgaagaggaagtcgttcgaactcatcatggtgacgaactccgttccttccggaaggtttttctccatccgctccatctgggcggtaatttctttattgacagcggtcgcattggaacccgctgtctggaagatcatatagagcacggcaggctggctgtccatctcactgcggaaattataagtcatagtgcccagttccacatccgccacatctttcagacggagtatcgagccgtcttcacgagagcggacaacggtgttctgaaactcttccacgctcttcagtcttccgcgatatttcatcgtgaactggaagacgttctgcgaactctcgcccagtgagccggtaggggcttcaatgttctgctcgcccagcacgccggtgatgtccgaaggcaccagcccgtattgtgccatccgttccggtttcagccagatacgcatactgtaggtatcgcccagctccatgacgtctcctactccctcgatacgcttgatctgcgggatgacgttgatgtccagataattggcaaggaaggtctggtcgtagcgaccgtcggtgcagaccagcgcgccgatttgcaggaagctggtctggcgtttcatcgtgcttacgccgactttcgttacttcggtgggcagcagtccctgtgctttggctacacggttctgtacgttgacagccgccatgtcggggtcggtgccttgcttgaagtaaacctgtatgatagccagacctgcattggaggcgctggacgtgatatacatcatgtcttccaccccgttgatgctctcttccagcggcatgatgacgctgttcatcacagcttcggcatcggcgcccgtatagctggcggatacatagaccgtgggaggcgcgatgtcgggatattgctccaccggcagggtgaagagcgagataagccctatggcgagaatcagcacggagatggagatagccatcaccggccgtttgataaatatatttcctttcataatcagtctccttcttatttaacctgtgtgccttcgcgcaccagtccggcgccttccgatacaatttcgtcaccggctttcaggccgtccagcactacatattcgcgtccgtcgttgattccggctacggtgatcagggtggagactgctttgccatccactaccttatatacaatcgtcttgtcctgcatccgcacggtggctgtttgggggatagcgatgcagttcttgtagatgctcggcactactaccgtgcccgatgctccgctatgaagcagccgtgattcgttggggaacactacgcgtgccactacggtccctgtctgacggtcgatcactccactgatggattcgatggtacctttcttctgatagactgagttgtcgttcagaatcagttccacttccggcatattctttaacgcttcgtccatgtcgccgtactgtcgggtaagggcgagcagttggttttcggtcatcgagaaatagacgtacatatccgaattgtcactgaccgtagtgagcggataaggaatgttggcgcttaccaatgcgcctgcacgatagggcaatgcgcctacaactccgtcactgggacttttcacttcggtataagagaggttgttgcgtgcgcttatttcctgagcttcagcctgtgccagttgtgccttggcggtgagataagagttttcggcagtcttcaggctaaattctgaaacgactttctgcgcatacagttccttgttgctcttgtaagtcagttcggcggtgcttgtagcggcgcgggccgcttccacattggcggtggcggttttgagcacggctctgtaaggtacttggtcaatgatgaaaagcaactgtccccgacgtactttctgaccttcggtcacgcagagtttctcgattgttcccgacacttgcggatatatgtcaatatcctgtcgcccgcgtatggtcgccgaataggaggaagaaagttctttgtccgttggttctatctgcatgactgcataagaagatttcactcctgcatccggtgcctgcttgcacgatgccatccacactgtacaaccgacaatccctatcagccgtatccaatttttgttcactgtaatcatacttactctttttgtcttttattaaaatcagaacaaaagtaggagaaaagaacaagtcaatggtgaccgatttttctctatgaatgtcctgttttcgttatttgtatttgttgtggctaactatttgcgtataaacgacatatcaaacaattataaaggagtttgggacattctgttttccctattatttaccaactttgcaaaaagtaaaaaaggagaggctatggaaaaagagaacattatgacagtagatatagaagactttaagaagagtcagcatatccttgattatatagacgatgactttgcgatagtcaacagtctggacgggattccgtatagtaatgatacggtccggctgaactgtttcctcattgccgtctgtgtggaagggtgtattcagctggatatcaactaccggacgtatcagttgcaggcgggcgacttgctgctcggtcttcccaatacactgatcagtcgtacgatgctgagccctaaatataagataaggctggcgggattttctacccgttttctgcaacgcattattaaaatggagaagaaaacgtggaataccgccgctcatattcacaacaatccggtgaagtctatcagcgaaggcggggacgaacctgttttcaggttctatcgggatttgattgtggcgaagatcaatgatgaacctcattattatcacaaggaagtgatgcaacatctcttctccgctctcttttgtgagatgctgggacagcttcacaaggaaattgatgctcccgataagggggacagcccgaaagaaggtatcaaacaggcggattataccctgcggaaattcgtggagctattatcgaaggacaagggtatgcaccgttctgtgagttattatgcggatgcgctttgctacactccgaagcatttttcgaaagtcatcaagcaagcgtgtggcaggactccgttggacttgatcaatgaaacgacgatagaacatatcaagtaccggctgaaacgttcggacaagtccgttaaggaaatagcggaagagttcaatttccccaaccagtcctttttcgggaagtacgtaaagatgcatttggggacttcaccggctaattatcggaatcgcaagaatgagtgagacgaagaatctcttggaaagccttcaggtagcgttcgctgactgtctccatattgatattttcccggatcatccgttccgactcttttcccatctccttgcaacgttcgggagattcgaacatctctctgattctatctgccagactatcggcgtctccgtctttgaagaaatagccgttcttgccttccatgaccaggtcgcgttccgtactgtcgcatacggcacaaaggacgggcataccatacgtcatggcatcgttgatcgaaagccctcccatgccggcaagcacatagatactcgattcgttcatataggcgcccagcgttttcgggtcatagacggctccgataaagcggatgctgtctgtcagttgcaggtcgtttgcctgttgtctgaggttgtccagttccggtccgtctcctacgatcaccagttccgcttccggatagtcggcagctaccttccggaaagcctctattaataaatctacccgtttccattttacgagccgtccgatgtgcagcagtcgacggtcgcacgggggaaggatggagggggaagccagtacggattctttttctttgagaagcgcttccgtatcggtcgagttgtaagtgacgtgtatctgctccttctttactccgtaagaggggaggatgtcgtaggcggctgtcgagtagttcagcgttccggcagcttgggcgtagcagtacttccgtatccttgccgttatccattggcgcagatagaatccggtccccttgctgagcaggcgcataccttcgtcgtgcatcggattggctttgaaatattccttgatctttccgtagggaggagtctggaaggggatttcacgaatcaccagcttggcgttgcaggacttcatagcctttctcagtgcgggctggaagaatacttgcaggaagtagggccatcctattaccactatatccggtttttcttccgcaatgatttcgggaagggcggggaaagcgctttttccgtagaacatcttcttctccggtgtagtcagatgcttgtagattcctccttctaccattttcacccctttgcctatggtcgtattccctttctttggactgacaacggttatttctactccttttgcctgtagcctgttgagcatggcattcaggtagtgggggattcctccgaatgtaaaaagtactttcattgtatatgcttgctgatttgattaaaacatgtgattagtttctccacttcgtgttcgtgggcgtaccgggcgaaagtctgagtatccatccttgtttcggtacacagcgagcggatagctgcgctgcattctccggcgttgtcttctccggtggtttgacctgttccgtactgctctaccctccgccccatgcagaggccgcggctgactatgaccggtttgcggaaggcggcagctttggtcaggaggttgctgctgccggtgaactgcttgtatgcggcaaaaataaggtcgctctccgctatcagggcattgaaacagctttcatcgggaatcttctccaatgagaacagacagttattccttgactccccgaacgcccgcaggtcgttttcctgttgtgcggtgagagatgatttccccgcaatgaggaagaaatattcatcctttggcaataaagggatactctctaacagtaactttatccccttgcggaaattgatggaaccgagcagggatatcaccttccttcctctggctttctccttcagtttgcgcagcaacgggtagtttgtggcgggagccgaaagatcggcaaagtcgggaaacagcagaatgtggcgctgaaatgtttccaggtctttcgctgaatattcgttcagtatgcctactcctacgcagtttttgcttcgcaggaaagggcgggtgtcgggcatccctcggtggtaaggcggcagggcggactgaaccagcaggccgctccactgatagggcagcaaaagattgaatagccataagggagccaatgtaggcagcatatcgtcgaggcaggcaaagaagaccagatcgggattcagccgttgaagactccggcgcagcctgtacagattttgcagtcgaatcactgcattgcgcagtacaaccagctttttctgcaacggttttccggcagggagcggcagcagcggaagcgctgagacaggctgaaaggcaacggtctcctgtacacctttcccgtcgggagcaatgagcgacgtttcgtgccccatgcccgcccatgtctgagcaaactgtttataatacgtttcccgatggcctgatactgaacaatctatgactgtaactttcatgattctgatgcttttgggggcttggacatttctaatgcttctgaataaacttgccgtaacttctgccccgccaactgaaagtcgaagcgactgacgatagactggcggattttctctttgtcgaacgactcgtaggtgtcgtacaatgttttcatcttagcggcgagcgcatccacatttcccggtcggatgaggaagccgctttcgggagtgatgatgtcctccggtcctccgcatatggtgccgatggcgggcaatcctgttgccattgcttcgatgaatacgatgccgaatgtctccgcaaaggaggccagcacaaaagcatcgcaagtagccagcaacccggacaattcttcccgtgacaggcggccggtcagttttacctgctcttccaggtggagagactgaatctgctctttgagtgactgcatttcttccccgtctccggcaatgagtaaagagacgtgcggcatatccttgaatgcccagtgaaaagcagtcagcaaatcccagaatcctttgcgcttattcaggtttccgatgctgatgaaagtgaaatgtttctctttctccgtccggtgagggctgaatgcaaaggtgttcgtatctacaaagttcggtatgacggtcactttatccgggtcactgacgtatgcgcacaggctccgtttcagtttcgtgccgacacagatgatcttgcgtgcctcgctgtatgccttctttagtatcactgcctgcgacggtgtcgtctgattgccgttgatggaagaggcgtgctctgtgatgacatagggaatcttataccatttataaaccagtcgtgcggcataccctgcccatgtgccgaagtgcgcatgaatcaggtcggggcgaccgtaagtgcggatatacttccgtactaacaagacggtcagcagagaccagatgattcctcccgcgcgggtgcttagtttcgggttccatgcgtgcatgcgcatggtgacgaaactgccgttatcttctgccgatatctgaaaatgactctctttgcggaaccgtttccatgtgaagttcttcagaggcctttgctccgtgaaggcaagtcctgtccggcagcctgatttagccagttgcatagcctgctcgaagaacatatatccccggtgcggggaggagtccttctcaggatagtacattggaagtatcagtatatgcatttgtcttttatttttagaagaagaatggtgatgaaatcgcggatacgtttcccgaaagtaacggtcggcacaccggtgtaggcggaggctttcttgcggaaggcctcttcgtcatcgaaagtggggtggttcacaaagtgtttgtacagcagatacaatcctctttttttctcgtaaggaagatgccataccgctagttgctcgtctcctttttctaccgtattgtatttggggtaggtccagaggcgtttgacgtattgattggcgatattgttgtggatgttgagcctcgtagccactacgctcaggaagtgggcttcttcgttcagtttgggctgattggcggcaaaacgttccagattataattccataaagcaggatacgcttcgttgattcgtgctactacatcaccacgcagcgagataaattctcccccgtaataatggacaagctctgttcttgtgactccgtttttcgtatcttgctgctctgcttcttccttttccgcttctgttttcttcgttgcctccttctctttttctctcttctctttttctacgtaacagtcattatagatatctgtcatctcctttagtgtgattccgttcacgctgaggtccggtcggtcggatgcatcgtacagggcggaaccgtatttccgtgtgtcgctgaacagttgctccaacggacgcatacagagacagtccgcatcgcagatgagcaacgtatcgtccgcttgcatccttttctccatatagcgcaggatatcatacaggtagaattgatttctccatgccccgtaccatcctttgggagggatgcagagataaggcagggtaacagtctcaatccgtaactccttgaataatcgttccagataatcgggaaactgatccagattgctgaagaaaagcaacttgtcatccggatgataatgcctgaaagtggtaaagaacggcacttgtatctgcatataaatggaatggacgagggcggaatctccccgtttgcctgcctgcggatagaaactggcatcttctttggattccttgtagaaccaggtcgctatgtaattggtaggtgtcgtcatgatatctttttctttttaatgaactgaatacattccttgaaaatgactgattgcattttccacaaaacaagtgcatatagagaagccacgaaaaacactttgatggtaagtgacaaatacagattagtgatgcccgacgttatgtaatgggctgcgattgtcagcgaagctgccagcagaaaataaggagcgatatctttcagtatgctgaacagcgtcagcggaatctctctccgggcaaagcagtaccagacaaacagccacccgatattgatagcgacaaacagataaatcatggtggtgatgccgtatggataactgatacaggcagtgatcagctgcaacacgctcagtgcgatactgttgaacataaagatggaagacctcccgcggctgaccagcaataaggagaacagattattgatcgggataaaggctccccatatacaaagtaattgcatgatccgtgcggaagcgagccacttgtccgtgatggcaatcagaatgaactctctggaaatgaggctgagcccgaacatggcagggaaagaaataaaagccgtgaaacgcagcattttatgaaacacggccgcctgacgctgcgggtcattagccacacttgccagtacgggctgggtgactccgttgatcattccggtgatgagggcgtgtcccttattgttccagttgttggcctggctgaagtctccgacttcctgtttagtgtagaatttacccagcaggacggagaacaggttttggttgatgataataaagacttgcgtaatcagcattttactgctgaatccgaacatctccctgatgggagagaagtcaatgcggaagctgggcttccagtgggcaaagtaccagttgagtgccgtgcctatgacgacaaaggtcattgtctgtatagccagaccccaataggcaaatccgtttgcggcaagaataatccccacaataccggatagaaacaggcttgaaagagaaatgatggtattctccttcactttgagattacggaaaagaagagctcgtggagctatcccgaaactggctataaagaaactgaggaaagagaaacgggcaagcgacgttaactccggagtatcataaaatttagcaatcagcggagctgaagaatagagcaaaatataaagaacagcactaaaagagatactgaaccagaatacagcgttatagtctttatcgctgactttctcgcgattggcgagtgctgcgacaaatccgctttcctgcagggcggaagcaatggccggaaagatagccagcataccgatcataccgtaatctgcagggtccagtaatcttcctaacactactccgaaaagaagtcctagtagctgctgtacgctgctgctgagccctccccaaaatagcccttttgctgttttttgtttcagtgactgttcttcactcatattattataccatatttcactttctgaatcctattggattacgtggcttatccgctgttgctttttgcgcttgcagttcggccagtgtttgattgatcagctccaattgtgtgcgggtatcctcattaatatcattataatcggtgaaggcctcttcgatataatttttcagttcttccatctgattttctaactggccgactctatctacaggaaatttggcaattagttgccgtatggcaacaaatgcacgtacaatcagaacactggtctgtatggcaatatcacttcggagtatactggagagcattacaacaccgtgttcggtaaatgctagtggaagagcagatttcggacgtttggcacgggatgtcatcacaaattgtgatgacatatcttcccattcctcatttgttagttgaaacataaagtcttcgggaaagcggctctgattccgctttaccgattgatttaagatacgtgtctcaacttggtacatttcggccaaatcaaaatccagcattactttctgccctcggacttcatatatcttactctgtattaatgtgagtgtaatatccattagcttatcacttattttacttcgctgcccggcttcacctctttctgaggcatgataactgccagactaccgtcgttgttttcggcactcagaatcatgccttcgctgacgatacctttcagcttgcgcggtgcgagattggcgataaagcaaacctgcttgcctaccagttcttccggctggtagtgctttgcgatgcccgatacgatggtacgtgtttccagtccgtcgtcaatcttgaattgcagcagcttgtcggctttcggcactttctgacattcaaggatggtaccaacacggatatcgagtttcgtgaaatcatcaaattcgatgttcggacgaatcgggtttgccttatagttggcttcttcgttggccttcttcgtgtcaagcaacttctgtacctgtgcctcgattacgctgtcttctattttttcgaacagcagttccggcttgttcagctgatgtcctaccgggagcaggtcgttccttcccagttccgaccattcgaagctttccatgttcagcatcttgcggagtttctccgagctgaaaggcaggaacggttcgaaagcgatggcaaggttggcaaccagttgcagagagatgttcaggatggtgcctacacgttccatgtcggtctttgccagtttccagggttcggtgtcggcaaggtatttgttgccgatgcgtgccaggttcatcgcctctttctgcgcgtcacggaatttgaatacgtcgagcagtttttctacttctgcctttacgtcggcaaattctttcagggtttctttgtcgtaatccgtcagttctgcgcaggcgggtactttgctgtcgaagtatttctgagtcagcaccattgcacggttcacgaagttaccgtatacggctaccagctcattgttgttgcgtgcctggaagtctttccaggtaaagtcgttgtccttcgtttccggagcattggcggttagtacgtagcggagtacgtcctgcttaccggggaagtcttccagatattcgtgcagccataccgcccagttgcgggaagtcgaaatcttgtctccttccagattcaggaattcgttgctcggcacgttgtccggcaggatatagcttccttccgctttcagcatggcggggaatacgatgcagtggaatacgatattgtcctttccgatgaagtggagcagacgcgtttcggggtctttccaccatgtctcccaactgtcgggaagcaattccttggtattggagatgtatccgataggagcatcgaaccacacgtacagcacctttccttccgcaccttctacgggcacagggataccccagtcgaggtcacggctgacggcacgcggctgcaatcccatgtcgagccagctcttgcactgtccgtatacgttggggcgccattccttgtggtcttccagaatccattggcgcaaccatccttcgtgtttgtcgaggggaagataccagtgcttggtctccttcatcacaggtttgctgccgctgatggcgctcttcgggttgatcagatcggtgggcgacagggaggttccgcatttctcgcattggtcgccataggcaccttccgaatggcagtgaggacactcaccggtgatgtagcggtcggcgaggaatgttttcgcttcttcgtcgtaatattgttcggatgttttttcgataaactctcctttgttgtatagcgtcttaaagaaatccgaagccagctcatgatgcgtcttcgaagtggtgcggctgtatacatcgaacgaaacgccgaattcttcgaacgatttcttgatcagatagtggtaacggtctactacatcctgcggagtgactccttctttctttgcacgaatcgtgataggtactccgtgttcgtccgaacctccgataaacaatacatcttctttcttcagtcgcagatagcgcacatagatatctgccggtacatatacgccggccaggtgaccgatgtgtacaggtccgttcgcatacggcagtgccgatgtgacggtggttctcttgaatttcttttccattgatatagagtgattttatgattttactgcttgcaatgtgcaaagatacggtttgcaacgtgcaaagataatgctttccacagatttcaggaagaaatgtgacaggaaatctgtggaaaaggcttgtttagcctgtgccgtttttacatcatcatattctttctgatggagaacttcactattgccatatcctgaatggtgtctacaggcaagtccatcggctcgtggtgcggattgtagctgacgagtttgacgtacccttccttctccgagcggttgacgtatttcaccgtcagatactggtctccgtcgaggtggaacgccacgatgtacatttctccgtaaatgacgttgctgaaattgttgatctccttgaaccctacgatatctcccgatttgagaatgggatacatgctgtctccgttgacaaagatggctccgtcgcacgcgggtatgcttggaatcagtattttgcccagcgcatattggcgcttgtcggaaagcagggttcttaaattggcggcggctgtgatgtcatagagcgtcacacttcggtcgtctatggcttctgtggtttttgaattgtgaatagtctctacttctccccgtatctttccgttgtcaaaagactttgggtcgtgcagcggacttccctttccggtcagcagccagttgtagtccacatgacgcagcttattcagcagtaaaggaaagtctatgctgtttcgcgcgcaccagttggaaagtgtcgctctggctactcctaaataggatgcaagttcactatcccgtttcagattcaacgctattttcgcccgctttacgatttccggtacattcagcagtgtatccgcttgtttctcattcatgtttttgcttacttttttatatgttaatatttattcttgccttatcgcctcatatacagtcttttgtaaaataattcagcgttaatatttaaaatcatttgttttatgtatgcgactttctatacctttgtggtattcgaaatgaatatttgatttcaaaattagaaataaaaattagataaaccatgagaaaacaagaaaaagatgcgaaatactttcaaaaaccgcattctcccccctccgaaaagagagctgtcagctgttaatagttgatttgtcaggagttaacagttgtcatattgggtattaacagctgacgtgatggctgttaacatctgacgggcaagttgccaatgatcattgtgtaggatgtgaacctcctgtgcgcaggctgccttaccttttatctgaaaacatatcaagtatatcaaaaagaataaccggaatggatacattacaaaaacaaacactttacgtttgcggctgttgcaaacacacgcttccttcagaagccttttacgtagataagaaaaccggccttccaaacaactactgcaaggaatgccgcaaatccgccagccggaaatacaggaagaccgagaagcgcacgctggcacgtgacgaccgtgaaccttatcccgttatcacctctacgaaagaccccgatcttcgtcagaaactgattctgtccgccctgcagactgtaagggcaagtatcaagcggaaaaagcagaaactttgtgaagtggaagcggaactgaatgattaacaaaatgaaaaaactgactgataaactatttataaaaacaatacaactatgggaagaatcaaacagggactggactactttcccctgagcaccgacttcatgcacgaccgtatcgttcgtcgtgtcatgaagcgtgagggcgattccgctttcaccgttttaatctatattatgtcttatctctattcgggcgagggctactatgtccgtgccgacaccgatttctgtgacgaactttccgatcagcttttcagtacggacaacgataccgtccgccgtgtcatccgtctgtttcttgaatacgggctttttgactctgcgctttatgagcgttacagcattctgacttctgaggatgtccagcggcagtatctcttcatcaccaaacgtcgcagtcgtcaccatatctgtccggattattgtctgctgccggaagagaaaacaacggatgagcagccagatactgttgccgcaacaggggaaaatgttgcagtatccccgaatattgcaacggcatcccgggatactgcaacaaaaacagctctcataaaaagaaaagaaaaagaaaagaaagaaaacatcttccctaaccctcctttcgcaaaaggaggggatgaagaagaagggagtgaaggagagaaagtagctgaaggagccggaggcgggatgagagaagaatgcgatcagcgatctgccacgaggaaacggaatctgacgcaggaagatatcgaccggatgcaggttcccccggacggatgtccccgcaatttttccggtctgctggagaatctccgtctctttcgtgttcctcctgcggaacaatatgctatagtgctgaaaagtaattacggtgaaatcggtggtgatatatggaaaggctttagcgtcattcgtggaagcggtgggaagattaaactgccgggacattatttgctgagtgtgctgaataaataatatgaatttgataaatatatgtatctcaatatgttatatgcttatttcttatattaactaacttattaacgcacatttccgaaatcgcttgtatagctgagaataagcccttatatttgcagtgtcaataagcttaacgacagaaactaacaaaaagattaataactaaaaactattacaattatgccagtattatataaacctttccagtctaatctggaagataagaaaagtgggaagaaactgttttatccccatgtagttcgtacaggaaatatcaattccgcacagctttccaaagagattgccgcatattcttccctttctccgggtgatgtaaaaaatacgcttgacaatctggtgacggtgatggcgcagcatcttcagtcgtccgaaagcgtcagtgtggatggcttgggaacgttccgcatggtgatgagtgcccgtggccggggtgttgagaccgccgatgaggtgagtgctgcacaggctacgcttaccgtccgcttccagcctaccacgacgaagaatctggatcgtaccaccgctactcgttctatggtgacgggtgccaagtgtgctcgctatgacaagctggtctccgcacctggtgacggcggatcggttgatgatccgaatgacaagcctggtggtggcagcgatggcggagatgatggagaagcaccggacccgacagtatagcttgttccttccttcgcgggaagaaatataagactaacgactgaactgaactgtaaaaacagaaaaacgaagaaacaagaaagaaactagagctaactaaggatcaccagctaaagactgataaaagataacaggttaaagactaggcttttaataagacaatcaactaaacagagaattatcaaatcacatgaggactatcaatttgatcgtggtgcattgttccgccacgcaggggaatcgtacgttttctccggaggaaaatacggtagggacacagagtaaactaaactatttaaagaacgagaaaggaggtaatttatggcaatgaagaaatcagtatgggatatgatcctaaaggtggttatcgcggtggcgtcggctgtggcaggcgttttgggtgctaatgcgatgagtttgtaagaaatctaaattcattaaagggtacataccaaatatcttgttgtgtacccttcttatatttatctaaactattctcaaaaataaaaaatatatgaaacgtttgagtattaaacatatacttgtaacattgctggcaatggtaggaatgataccaccggttgttgctaataatcttccatcaattacttctttggaacgtgaaccagtcgtctattcgccgcaagtggcttcaatgatccgttacgatcatactcgggttaatcagaatacaggatgtattaatcaaaggatatcgcttgtaaatttcttggataaggattttgactttcctatttccatatcttacacttctcaaggatttcgtccacaagtagctgataattatgtagggagagactggatgctagatgtcggtggaataatctaccgtaaagtgaacggaatgccagatgatttgaagggatataaaactttgcccggagtccataatacatatacgggatttcttgcaatgctgggaaccaattatttcaacatggacactatgaaaaaagatgtatatcagaatccttataagtacgcttaccgaccagaaagtacaatggctactttgcctgttattcctcctacagagaataaagggaatatagaaagttgtcctgatgtcttttatttctcttttggaaagcattccggaaaattcatgattaattatgatggaagtataagtgtcatcggatacaatgggggtaaataccaagtggatttaagtggcatgaagttgctagattctacttcctctcaaaatacctatattcgtattcttacagatgatggctacgtatatacttttggtggtgatggttatgcctctttggaatataccgcacttgcatggaaaggcggttctatttccaatcctgatagtgaaataatgcataatgaaataactgcttttcatctgacacaaataaaagcccctaatggacggatattaaatatccattaccgggatattggtccaatttatcatcaatttccaaccagactgattgatctgaatcagagtgccgactatgcgaaaaaaacagatttactgacacaatacttgcttagtggaaaaagaactgccgttaaatataatgtaattgaaaataaacttaatttcaagactaatcccccaatgtacggagagacagacggaactttaaagaattcttattctttgactaaagttgctttgatagatcgtattgaggttgatggctgtactatacatttttattattctgctcgtagcaaacatactattcctgttggagatatgaaggaaggattttttcttaatagcggtgcgaaactcgattctgtagaaatgaagtataaccagataaaggaaatagcacggttcaaatatgattttaattggggtaatcgtatgtttctgagtacagtgagcacaacgtgtgaagggacacatagctttaagtactatcttccgaatgtaccagaaattccgactcctctaactggtaacattgaccattggaacttttggcgtggaagagataagaacgctggattgataccgggaatgacacaagaaggagataaccaactggattttgagttcaccaccaatgaccgcgatgccacaggaaaagactttgatgcaacccaattggagcaaatcacctatcctacaggcggcagtgtgcagtttatttatgagcctcatcgatattcctatatcagcaagcagacagaaggttcatcttactatccgtctcttgaattcccttctttgggtcgctatggatgggctggaggtgcacgtatacatctcattcgctatttcgatgcgaatggtaaagaacaaagagaaatagaatatacatatggaaaggacttgaatgaaggagaagtgatgtatatacctttttataaatatcttcgaattgagcctaactttgacaagcctggtcaatatgttgttaaggcagtatcatataacagtgatggttttagtgatgttccctatccatccacgcatattcgttatcctgaagtgacggaacattatcttgatccaagcaaggggggggatagagcaggaacactcatataagataacttattttcaaggctatctgcagaatctctcttggtatacagataacgctttttttacaccattaaaatcatgtgcccaaaatgaatatgagatggcggaaaattataaaaccttcttgaaacatttggtggcacatcctacagaagatcttattaagcgttacgggaaaatatccaaagaagtttattataatgaaaatggtaaaatgcaaaaatgtgtagagtataaatatcaatataataactctgacaagtacggtttgtgcatatttacacctagtttccctcttgatatctactttggattatttactcatattgcacaagaatcttttcgcacattcgttcccatgagtaaacgtactgttatttatcaaggaagccaagaagaagcaaaagttcaaatggaatacttttcctatagcgaaaacggttatctgaaagaacaggttatggtaaaaaataatggagattctttaatcacttggaatttgtatgggaattattctacaagtagtggctttcaaatattaccgactgacagaaagctttatctgggtacttctcatgggaggaaaatacttaaatcctataattttagttatcgtcctttggaggttctttccggatggcgtcagtattttaatgttttggcacgagaactacaattagatgaaaattataaacctattgaaaggatagattataattattatgataaatatgggaatattttggagaaggtggagaacaactcaaaacatactgtttttttatggagtcactatggacagaatcccagagcacggatagaaaatgctacctatcaagaagtgagttctgttttaggttgtaaactagaagacttgtctgctttaacagtatatactcctattcttgacaatgatttccgaattaagttaccttgtgcaagagtatttacttattggtgtaatcaacgtaatagcataacaacctctactgcccctaatggtcagagtacttactatacctatgataaaaggggaagattgattcagacttatcaacttaatgaagagggtagaatggaaatacttcaattaaataattatcacattgtaaatgaataaacacttgaggaaaatatgaatacaaaatacttgaaatttatgtttttcctattggtatatttactgatagggacacaggcatatgctgaatccatagatgtaggaagtccttacggctattttaagaggtcttttatttctaatactaaaacttctttagcatcggatagttatggaaattccaataatgatgtgcattatagatttcggataaatgctccaactgtattgctagttcatcatgtcggctcagagttatcgaatacatctatgtacttgttgaaaaagacagcagaggacagtatgtatactgaaatatgcgttgcacgtgatgactcacaaatagaagagactaaagaaatacagaaatacttacttccctatgatggtgaacaggaaaaaaatctggcaataattctacaaaatcaggcttttatttgcatggttttggaaatgggggaatatgatcttgtttgtgaaggtagtactttgacggatggtgtgaataatgggaagatttgtacaacctttagtatgttacaggagggaatgttaatagatagtcctattgatttagggacgcaaggttgttgcttttcctacgatatggatgcacattataatgtaggcttcaccgggaaactacctgtttattatagagtatgtcttaatgaaccaatgtcaattaatgtggtagctagatccaatgctcttatacaggcgtatgtatatgatgaacagaaatgtgaaatggaacatagttacgatggtaacataactgacatggggcttaaagctggtatctattatatttatctgactgggtatgataaagatatttatcttcatacatctataacaggagtctctgttaatacaggaaactgcatagatgtaccagttcaaataactcaatcatcaaaggatggtagcatatcttttgatatgtcttgtaatacaactttatatacagataattatcatgggagagataccaatgatatgttttttgttcttcattcagaggattccatttctcttcagattatgattcatcactttgaaatgataggagggttagaacttacgcttatgaaggggaaactaggagaaaaaacattattcactattcaacaaaatgatgacatcagacttgaactttcttctgggacttattatttgatttgcgaaggggtagcgacaaatggacgttttggacttagcatagaaggaaaatgttacaaagaatcggaacaaccagggccagagggaccggaaccaatggagaattattctcccacaataagtttgaattatattcagacaattacgccaatggtatctaatgatacgataagtaatttctcttatctcagcaaagctgttcataatatacactactttgatcatttggggagacctgtacaggaaatatcgtataaattttcacctaaaaaacaagatatagttattcaccacgaatatgatggattgggacgtgacagtaaacaatggctgcctgttgcttgcacaaataaggaggcgggggcatttgctgaacaagaagttgtatctgcagacgctcgcattttgtatgcggatgattcggcattcagttattcggtatacgaggattctccgcttaatcgtgtgatagagagttatggtcccggacaagcatggcaaagttccggacatagtaataaaaacaattatcgtattaataatgtcgaagattgttgtttgtttctgggtgtaggtggaacacgggacaatcctcaattactgcaacatggacactatttggcttatgagttggatgtcatcgaaaccagagacgaggatggacatattaaatacagttttatggataaagaaggacaattgatattgtctcgaaacgttgccgacaaagatactttggatacttactatgtttatgatgattttggatgtctctgttttgtattgccacctaaagcagtggacaatttagtagaaatgtctcaagatatattggacaagtatgcctatcaatatcgctatgattatcgccatcgttgtataagtaaaaagatgcctgattgtgattggattgaacaaatatatgatcataataaccgtctcttatttactcagaatggagaacaaagaaaacgcaatgaatggagctttttctgcatggacttattggatcgtcaagttcttacaggtatgtatcgtggaactataccgaatcgtgaaatttgtgatgcttcggatatatacgcagtatttgctctagacagtgttaatacttactatggttataggattcaatgtccggaaagcattcttactaataagttagaaatattacaagtgaattattacgatacgtacgattatcttaaatttttgcatggtattaataaagaattgttttatgtcgaagatactaaatatggacggttgtatgataatcaacaggagcaacactgtaaggatctgctgacaggaaatataactttagtcttgggtaacgggcagaaactatatcatagttattattatgattattatcggaatcttattcaagaacggcatacgacagtgaatggaaagactttagtctataaatctaattttaactttagcggacagccaatagacgtttgtaaggagtatgctacagatgctaagattcaaaaaagctatgtttatgatcatgcagggagactgacgagagaggtgagtattattggaaatgatacaactgattttgtttattgttttgatgaaatcggaaggcttgatagtttgatacggataaatggatcagattcattaataacgacaaatgattataatatccgtggttggttaactgagattgatagtccattttttaggcagaaattgcactatactgatggtatgggtgttccttgttataatggaaatgttagtagtacgacatggcagaatgatgcatcaacgacacgtggttatcgattctcttatgacggactttcacgactgaaagatgctatttatggcgagggagaaggcttggtaaataattgtaatcgtttcaacgagaaagtgaccggttatgacaagatgggaaacatcttgggtctcaaacgctatggacagactgcagagaatagttatggtctgattgacaacctttttcttacttacaatggtaatcagttgcaagctgtaaacgacgatgtaacgagtattgtttccaattataattctgaatttaaagatggagcaaagcaatctgtagaatattcttatgattctaatgggaatttaatacaagatttaaacaaaaagatgattgaaattcagtataattgtttaaatttacccagtcggatacagtttgagggtggaaacagcatcgcctttctttatgatgcaaacggaacaaaaattcgtactacacacataataaatggggtcattacttccactgactactgtgacaatgcgatctatgaaaacggagtgcttgataaactcttaacaggagaaggatatattaccctatcagatactgtttaccattattttctgcgagatcatcagggtaacaatcgggtggttgtcagtcaggatagaacagtagaagaagtgaatcattattatccgttcggaggggtgtttgcttcggattcatctgttcagccttataagtataatggcaaggaactggatagaagaaacggattggattggtatgattacggggctaggatgtatgatccaattttggggcgatttatggctactgatcctttatatgaaatgtcatactcggaaaacccttatacctattgtctgaataatccttttaatcgtgtggatccgacaggaatggtatcacattacaattggaaaactcatcgatatgaggatgaaaatggaaatgaagtttcttgggaacaagtgaaacaggagtatatgccagaaaaagaatctaaagtagaaagaactgaggataattattctcaggaaatatcactggtaaatacattcttagttccttggggaaatgcagctgctcttcacgccggattgaaatatactgaacatccgtttggaaagggttactttagaacgaagaagggaaaatatttttcaatgaatatttttcatcaaccggagggtaccaagttggctagaaaagccaaaggtcttgtaaatagtgctaaaggtgcaaaggatgcaacaaaaatagctagaggattaggtaacgtagtaggagtagtctctacagcaatgtctggatatctattttataatgatcctagtgttagaaatggtattgatatttctatgggtataattagttttttctattggcaagttggtgtagcttcttttgtcggatcatcatactatgatacaagtgtgatgaactataatcaaaaaaaagagaatctcaaaaatggagtgaatcctattatgggcacttttaattttcagacagggcgatatgatttctaaaatttatattattaaccgtcctttattaaaggatttaatacaagagaatagatgaatattatagattattttgtatatcttatttttcgtttttttcattgtcctcctgtaggaaaaaatgccaatgatgctaaattgttttctctaatgatagcgggctggattatgggaatgttcattatgacgataggatatagttatttgttgtgtacaaaaaacgaactggtatttttttttaaagatagaagtccagtcataggtatggtagtaacttttgtgatttggatattcttatttttagaccattatttaattcgaaaagaagcaatcgtcttattggataaaaaatataaattatttaccccattaaagcgaagaataataaagtggatcactattataagtattataatggttgttgtaactttgtttatattaaatagatatgtcgatatgcttcattcttaatgtgttgtaaaggttgttttgagttattcttgtttgtttttagcatagaagtaacttgatttgacggctaccctaacattcaggacaagactctatgttagggtagttttatgaataaaaacattataattaggaaaacataaactagtaaattctaattaaatcgacaaagagctaccactattaagttatgattgggaataaaataataattttgctttctgtgaaaattaagttaaagcataaactagctaaatgttactatattatatattaagcctggaatttattttatatttctaagaacttccacccataattctcctctttttctttcttttttctcgcaggaaagaatatatttgtatcctagtttaaacgaaaaccagtgtatgatatgataacaacccagttgcttcgtcccgagagtatagttgtagtaggggcttcgaataatgtacataagccgggtggcgctatattgaagaatctgataaacggaggttatcagggagaactccgggctgtgaacccgaaggagacagaagtgcagggagttcctgcctttgcagatgtaaaagaattgcctgataccgatttggctgtgttggctgttccggctgtgatgtgtccagatatagtagagacactggcaagcgagaagcagacgcgggcatttatcatactctctgccggatttggtgaagagacacgcgaaggagcgttgttggaagaacgtatactggaaactgtcaacaaatatggtgcttcactgattggtccgaactgcatcggactgatgaatacatggcatcatagcgtcttcagccagcctattccgaacttgaactcaaaaggagtcgatctgatctccagctccggtgctacggcggtctttattcttgaaagtgcggtgacaaaaggattgcagttcaattctgtctggtcggtaggaaatgccaagcagattggtgtggaagatgtgctgcaatttatggacgagaattttgatccagagaaagattcccgtatcaagttactctatattgaaagtattcacaacccggacagattgctcttccatgcctcttcattaataaggaaaggttgtaagattgcagcgataaaagcaggaagttcggaaagcggaagtcgggcggcttcttcacatacaggagcgattgccagttccgattcggctgtagaggcgctgttccgtaaagccggaatcgtgcgttgcttttcccgcgaagagctgactaccgttggttgtatcttcaccctccccgaactgaaagggaagaactttgctatcattactcatgccggaggtccgggagtaatgctgacggatgctttgagcaaaggcggactgaatgtccctaagctggaaggtgaactggcggaagaactgaaagcccaactctttcccggagcttccgtaggaaatccgattgacatccttgccaccggtacaccggatcatttgcgtatctgcatcgactattgcgaagaaaaattagacaatatagatgctatcctggctatcttcggcacacccggactggtgaccatgtttgaaatgtacgatgtccttcatgaaaagatgcagacctgtcacaagcctatattccctgttcttccctccatcaatacagcaggagcggaagtggcggcattccttgccaaaggacacgtgaacttttccgacgaagtgactttgggaactgcactgtcccgcattgtcaacgccccgaagccggcggtgcctgagattgaactgttcggagtcgatgtaccgagaatccgtcgtatcattgattccatcccggagaatggatacatcgaacctcattatgtgcaggcattgctgcacgcagccggtatttcattggtcgatgaatttgtttccaataaaaaggaggaagtcgtggattttgcccgtcgatgtggattcccggtagtagccaaagtagtaggtcctgtacataaatcggatgtcggcggcgtagtactgaacattaaaggggaacagcatctggcacttgaatttgaccgtatgatgcagattcccgatgcaaaagcgatcatggttcaacctatgctcaagggcacggaactttttattggtgcaaaatatgaagaaaagttcgggcacgtggtactttgcggtttggggggcatttttgtggaagttttgaaagatgtatcttccggtttggcgcccctttcttatgaagaggcttattcaatgattcgctccttgcgtgcctataaaattatccagggaacacgtggacaaaaaggagtaaacgaggataaatttgctgagattatcgttcgtttgtctaccttgctccggtttgcaacagaaattaaagaaatggatataaacccgctcctggccactgagaaggcggttatagcagtagatgcgcgcatccgaatagaaaaataggactattctttcattcattgagacatattttctatctttaggcagtaattttgcctacatttgataactcaaaacaaaaaggtagaaaatacgtatagtatgaagaaagctttagtactcctggtaagttttatatgctatcaaatcgtctgtcatgcacaagtgatggatgagcattattatttcaaaaacctaagtgtacagaatggattatcccaaaatacagtaaacgctattttgcaggataaacagggctttatgtggtttggaacaaaggacggactgaaccggtatgatggtttgtcatttcgtcagttcaagcacgacggtcgcagtcagagaagcattggcaataatttcataacagcgctttatgaggatgcggaaggaaacatttgggtaggtacggatgtgggactctatatctattatccggagaatgactcgttccggcattttgaagaattgagtgcggaagaaaccaagatagaacacactgtgacagcgattgtgggagatgaccagggatgcgtctggattgcggtagagtctcagggactcttttgttatgatttggagaaagagaaacttcagaattttaccttgaaaaactttcctttcatttccactaatgtccagtcttttgtctttgataacagcggaactctctggataggctgctatggtgacggactcttttattcaaaagaccgtctgaaaacacttcaaccctacatctctcccgtcgacaataaggaaactttcgagaacgatgtcgtaactactcttgtaaaaggtgcctataattgtctgtatatcggctctttgagaggtggggcaaaggagttgaacctaacttccaacaaattacatgatttgctttccgttgatgaaaatgaagaaccggttctttgtcgtaacttgctggttgcttctgataatgaattatggataggggcggaatccggaatttatatttataaccttcgaatgggcaaatatgtccatttgcgcagttcaatcaatgatccatattctctctctgacaatgcggtctattcactatgtaaggatcgtgaaggaggcatatggattggttcttatttcgggggagtgaactactatccccgtttctatacttactttgaaaagtattatccgaaagggacagataatggtttgcatggaaaaagagtacgtgagttctgtcaggacaatcaggggatcttgtggatcggtacggaagatggaggattgaaccgctttgatccgaaaacaaaaaccttctctttcttcactccaagtaatgcgttcactaatgttcatggattatgtctgattggcgatcatctttgggtaggaacttttgcgaaaggagtgaaagttattgatacacgtacgggagcgattgtgaaaacatatcagaaaaccgattcgccacgttcattgatagataatagcgttttttctatttgtcagacaacaacgggagatatttatttgggtactttgtttggtttgctgcgctataataagcagaccgatgattttgaccggataccggaactgaacggtaagtttgtatatgatatcaaagaagattccggcagtaatctatggctggcgacctatgctaatggggcctattgctataatgtcaatgaaaagaaatggaccaattacttgcacgatgaaaacaaccctagaagtctgccgtatgataaggtattgagcattttcgaagattctcaccgacaaatctggttaactacacaaggtggaggtttctgcaagtttcatcccgaaacagaaacttttactagctatgattcccgtaacggattgccgaatgatgttgtttatcagattgtggaagataaagaaggccttatgtggctgacaaccaataatggtctggtgtcttttcagcctgccacgggagcgatgaaagtatatactaccgccaacggtctgttgggcgagcagtttaactatcgttccagctttgagacggaagatggaacgatttatctgggcagtattgacggctttgtcgcttttaatccgaaaaacttctctgaaaataagtctcttccatccattgtgattacggactttttgttgttcggaaaagaagtatatcctggtgatccttcgtctccgctgaagaaaagtattaatttcttggatgagctggttcttcagcctgatcagaattctttttcatttcgtgtcgctgctttggatttccaggctccgcgaatgaatcagatcatgtataagttggatggctttgatgatgaatggctgcccgttggagagagtcctgtggtatcctattccaacttgtggtatggcaattataccttccgtgtgaaagcttctaacagtgacggagtatggaacgaaaatgaagtatctttgatcgttcgtatacttcctcctttttatcttactatctgggcttattgcgtatatgttttgctgatcataggctgctccctgtatgctgtgtggtatttcaagcagcgaagtaactataagcatcgcaggcagatggagaagttcgagcaggaaaaggaacgcgagatctatcatgcaaagatcgacttctttacgaatgtagctcacgagatacgtactccgctgactttgattaaaggtccactagagaatattattcttaagaaaaaggttgatgcggagacgcgtgaggatctgaatattatgaagcagaatacggaacgtttgctgaatctgacgaaccaattactagacttccgcaagacggaaagtcagggattccgtttgaactttgctaaatgcaacatcacggaggtgctgaaagaaacccacctgcggtttacttctcttgccaaacagaaaggactggaatttaccctgcaactgcccgagacggatttttatgctcatgtcaatcaagaggcattcaccaagattatcagtaacttgctgaacaatgccgtgaaatattcggaacattatatacacgtatctctggaggtgaccgagggggatgaaagcaatgtattccgtatccgtacagtgaatgacggagtgattatccctcgtgagatgagggaagaaatattccagccttttgtccgtttcaacgagagagaagacggaaaagtgaccaccggaacgggtatcggactggctctttcacgctcattggccgaactgcatcaaggaacgctggctatgggggaagaagaaaatagtaataccttctgcctgacattgcctatcgttcaggatatgacaattactttgactccggaaacaaaagcggaaccggaacctgtaagtgaggttccggtggaagtggaacaaggagaaaaaaaagacaatcgccctacagtactggtagtggaggataatccggatatgcgagcctttgttgtccgccagttgtcgaaagaatatgccgtactgtcggcagtcaatggggcggaagccttgaaaatgttggatggcaattatgtgaatttggtagtgagtgatgtagtcatgcctgtgatggatggctttgaactctgtaagacgattaaatcggacttgaattatagtcatatccctgttattctgctgactgcgaaaacgaacatccagtctaagatagaaggcatggagctgggcgcagatgcctatatcgagaagcctttctctgtcgaatacttacaagcttgtgcctctaacctcattcagaacagagaaaaactacgccggacttttgcgcagtcaccttttgtggcagccaacaccatggcattgaccaaggccgacgaagactttatcaagagactgaatgaagtaattttggctaatcttaataatccggagttcagcatggatgatatagcggacagtttgaatatgagtcgttctaacttctatcgtaagataaagggagtactggatttgagcccgaatgagtatcttcgtttggaacgcttgaaaaaggctgcccagttgctgaaagaaggagaagggcgagtaactgaaatctgctatatggtaggattcaactctccgtcctattttgccaaatgttttcagaagcagtttggagtgttgccgaaggactttgtggattgaataatcagttagccttgatacggaaactgaaataaaatacgagaatttaataaattaaataatgaaagatacacctattagtagacgagattttctgaaaaatatgggaatagccggggctggagcatttcttgcagcgagtccctggctttctgcattttcggaggtgacgaacacgtctagtgaaaaatgccgtctggcaattatcggtcccggttcgagaggacgatttttaatgagtttccttgtgaaaaatccgaaggtggatattgtagcgttgtgcgatatttatcagccttcgattgatgaggctttgaaacttgcccctaaggcaaaagtatacggtaactataaggaggtgttggaagataagaatatagatgccgtccttgtggcaactcctcttagtgctcactataaaatagtgatggatgcttttgatgccgggaaacatgtattctgcgaaaagtcaatcggttatacgatggaagagtgttaccatatatatcaaaagcatcgcagcaccggaaaaattttcttcaccgggcagcaacgtctctttgatccgcgctatatcaaggcgatggaaatgatccatgcgggtacgttcggcgaaatcaacggaattcatactttctggaaccggaatggcgactggagacgttctgttccttcaccaagtttggagcgtctgataaactggcgtctctataaggaattctcgaagggattaatgacggaacttgcctgccatcagcttcagataggtagctgggcattgcaaaaacttcctgagaaggtaatggggcacggagccatcacttactggaaggacggacgtgaagtatatgataatgtaagttgtatatatgtattcgatgatggcgtgaagatgacattcgattccattatttccaataagttctatggtctggaagagcagattatgggtaatctcggaacggtggaaccggaaaagggacgatactactttgaaagtgtggctcctgcaccggcattcctgcagttggtcaatgactgggagaacaaaatgtttgattcactgccttttgcaggtacaagctgggcaccggaaactgccaatgcgaatacaggagagtttattttgggcgaacgtccgaaaggtgacggtacttccttgttgctggaagcattcgtagaggctgtgataacacaaaaacaaccggaaagaattgccgaagaaggctactatgctagtatgctctgtctgttgggccaccaggctatggaggaagaaaaaacgctttactttcctgaagaatacaaaattgactatctgaaccatcaatccaaaacactcgaaacagtatgaaagatacagtcctgaccgcacgacggaagaaaatagaaataatcactttacttgtatgttttgtgcttgccaatctggtgaatctttatgcaatcatcacatatcacagatccatgatggagatgatcacctctattttctatataatcatttttgcttttgtactctatgccgcatgggcgcttctgcgcctccttttctatggagtgaaagcgctattcacaaagaagagaaacaggctgtgagaacagacctgaacgaatatacttaatcaatatcaatgaataatttatgacaacacgaagagattttctaaagacaatgtcactggcctctgccggattagcactgggatccggtgaactgctgaatgctcaaactatttcatcgaaaaaaggaagaaatgaaaaggtaaaaatagcctatattggcattggaaaccgtggagagcaaattatacaggattttgcacgtacgggtatggtagaggttgtggctctgtgtgatgtagacatgggagctaaacatacacgaaaggtgatgggcatgtatcctaaagcgaaacagttcagagacttccgccagatgtttgacaaggctggtaacgagtttgatgctgtagcaattgctactcctgatcactctcacttccctatcagtatgctggctctggcttccggcaaacacgtgtatgtggaaaaaccgctggcccgtactttctatgaggcggaactgttgatgcaggctgcccttaaacgtccgaacctggctactcaggtgggaaatcagggacactcggaagcaaattacttccaatttaaagcttggatggatgcagggatcatcaaggatgtgacagctgttactgctcacatgaataatccgcgtcgctggcataagtgggatacgaacatttataaactaccttcaggccagcaactcccgaaggatttggattggaatacctggctgggagctgttccttatcatgaatattgcaataagtatgatcagggtgaatggcgttgctggtatgacttcggtatgggagctttgggcgactggggagcacatatattggatactgttcacgagtttcttgaactaggcttgccttacgaagtgactctgacacatcaggaaggacacaatgattactttttcccatattcttctacgattcttttccgtttcccgcagcgcaaaggaatgccaccggtagatgtcacttggtatgacggtctggataatcttcctcctattcctgcaggttacggtgtttccggactggatccgaacattcccaagactaatcagggcgatgttcctcctgccaaactgaatccgggaaagattatttattcaaaggaactgactttcaagggtggtagtcacggaagtactttgtctatcattccagaagaaaaggcaaaggaaatggcagataagttgccgaaagtgcctaaaagtccgtccaatcacttcgagaatttcttgctggcatgtaatggcattgaaaagacgcgttcaccgttcgagattaacggtgtcttgagccaggtattctcactgggagtaatggcgcaacgtctcaatacccagttattcttcgatccccgcacgaagcagattaccaataatgaatttgctaattcaatgttggccggacttccgccgcgtaaaggctgggatgagttctataagttgtaaagaccggtaggaaatataaaacagaataaagtttgattataataacaatataagtaatgaagaaaaatatcgtattgactttacttttgttctgtgccgcttctttgtcagcacagaattgggaaccgcttttcaatggtaaaaacctgaaaggatggaaaaaactgaacggcaaggctgagtataaaatcgtagacgatgccattgtaggtgtatcaaaaatgggaactcctaataccttcctggcaaccaccaagaattacggagattttatccttgagtttgactttaagattgatgatggtttgaattcaggagtacagattcgcagtgaaagcaaaaaagaatataacaagggtcgtgtacacggttatcagttcgagattgatccctccaaacgtgcctggtcgggtggtatctatgacgaagctcgcagaaactggatttattctttgaactggaatccttcggcacgtacggctttcaagaacaatgcatggaataaggcccgtatcgaagcgataggcaactctatccgtacatggatcaacggagtgccttgtgctaatatctgggacgatatgactcctgtcggatttatcgctttgcaggtacacgctatcggcaacgctgctgacgaaggcaagacagtaagctggaagaatatccgtatctgtacgacagacgtagaacgttaccagacaccggaatctcaggctgcaccggaaagaaatctgattatcaacactctttctccgcgtgagaaaaaagaaggctgggcattgttgtgggatggcaagactaacgaaggctggagaggagcgaagctttctaccttccctgccaaaggctggaagatggaagacggcatccttaaggttatgaagagtggcggtgccgaatctgccaatggcggtgacatcgtaactacccgtacttataaggactttatcctgactgtagatttcaagatcactgaaggtgcaaacagcggaatcaagtattttgttaatcctgaaatgaataagggtgccggttctgctatcggttgcgagtttcagattctggacgatgacaagcatccggatgctaaacttggtgtgaaaggcaacagacaattgggttcattgtatgacctgattccggctcctaagaataaacctttccataagaaagagttcaatactgctatgatcatcgtcaaaggcaaccatgtagagcactggctgaatggagagaaactgattgagtatgaccgtaacaatgaaatgtggaatgcactggtagcttatagcaagtataagaactggcctaactttggaaatattattgaaggtaacatccttctgcaagaccacggagatgaagtatggttcaagaacgtgaagattaaagaattgaaataagaatatattgtagaagaggagttgtgccggaaatctcattttgttgatgaatgctgcttcgagcacagctcctttcttttttgatagatgaagactgccattcaacatttgtacagaccatcccatgagggcgacggattactttacgtctggttcccgtctatgcatacacgcgtagatattcttttgtgcagtcagaaatcagaagaagaactgctgtctgttgctgaacgtattcatgaagctttaagctgcctggagaagacagccaactattatgatcctgccagcgaactggctgtcgtcaaccggaccgcttctgtatctccggtagttcttagcagtcaactttatgcaatggttgatctgtgtctggaatatcacgagaaaacatcgggatgcttcgatgtgacagttcattcggagaattataatcaggatactattcattcggtatgtttgtcggcagaagaacaaagtattttttaccggcaaccggggataacgatcaacctttcaggatttctgaaaggatatgccttggagacaatcagagacatattgcactcctgttctatagaaaatgcgttgatcaatatgggaaacagttctgtacttgctttaggcaaccatccggccggaacgggatggaaagttaactttggcaaccagtcggagacggaaaagaccggggagccacagagtatacttctttataatgaatgcctcactacttccggaaacgaatcggatgggcgcaggcatattatttctcctcaaaatggcaacttcgtagagggtatcaggcagatagcggtcgtaacaaagaacggggctgtcggggagatactgtctactgctctgtttgccgccggtccggaacagcgcgaaacgttgcttgccagtctccgccctttacttgtcaatcacttcctgatcggttattaatcgaccgcattatttcttctttctggcgataaaacacgtctggaatggtcttttgaccatattattccatttatcggtctatttcttttattacttctgttgatttttggttttctttgtagcgtcgattatcaatctaacttttatatgaaaaataagattttattagtagggctgttttgctgtagccttgtatcaacagaagcacaagtattattggataagaacgctggtaaaaacagttttcccatcgtttcaccggctgccaatgtcgttgtttgttttgatggcaaggatgaaactgtcgttcgtaagagtgtgactttatttgcggacgacgttcgtcgtgtgacgggacaggacctgaaaacacaagcaagtaatccgggtgatgtctcggctcgttatgccatcatcgtgggaactgtcggaaaaagcgcatggatcaatgcgctggtagcccaaaagaagatagacacaactcccatcaccggtggatgggaacgttatatgatagaaacggttgataatcctgcaccgggtattaagaaagccattgtcgtagctggtagtgacaggcgtggtacggcttacggacttctctccatatctaaagcgataggtgtgtctccctggtactggtgggccgatgctccgataaaacaacagaaaaaactggctgtcaacgttcataaattcatttcaaaagaacctgctgtcaagttcagaggtatctttatcaatgacgaagactggggactttatcgctggtcaaagaacaattatgagaaagaacgtggaaacttcggaccgaaaacatacgcgcagatttgtgagttactgctccgtcttcaggcaaattatctgtgtccggccatgcacgatgcgtctatggcatttcatcgtataccggagaatagattggtagcagatagtttcgccatcgtgatggggtcttctcactgcgaaccgctgttgttcaacacggcaagcgagtggaaacgtgacaagatgggcgaatgggattacatcaacaatagagcgggagtagacagtgtgctgagagcacgtgcgaatgaatgtgctccttttgagaatgtgtacactctggctctgcgcggattgcatgacagagcgatgaatgcgagcaatgatatggcggatagaaaacagatgctccaagatgcattgatggcacaaagaaagatgctgattgatgcgacgggtaagcgtggcgaagatatcccgcaagcctttactccttataaagaggtgctggatgtatacgacgaggggctggaactgccggatgatgttacgattatatggccggacgacaactatggctatatgaagcgtctgagcagtccgaaagaacagaagcgttcgggacgttcgggtgtttattatcattcttcctatctgggcaagcctcacgatcatctttggatgaacaccacttcacccacgctgatgtacgaagaacttcgcaaggcttatgacatgacggcagaccggatctggctgctcaatgctggtgatatcaaatcatgtgagtttgctgtagatttcttcctgtcgatggcttatgatatcgattctttcaattttgacagagcggctacttatcgcacggaatggttgtgtggtatgctgggtgatgaataccgcaatgagtatcaggatgtgatcaactcattctacaaactggcttttgcccgcagaccggagtttatgggatggggctatcagtgggctaccgataagcatggaagagaacggaatacagatactgatttctccttgacgaattacagggaagtggattcacgcctgagtgaataccgccggatcggaagcattacagagaagattctgaataagctgccggaagagaaaaaggcctgcttctaccagtcattgtattatccggtgaaaggatgtgagttgctgaacagaatgatactggacggacagagaaaccgttggtactccattcagcaaagagcgtctaccggcgaactggagaaaaaagtgaaggcttgttatgatagtctgcaagtcattaccaaaggatataattcgctgctcggtggcaaatgggatcatgtaatgacaatgaaacagggatttgctgctgcttactttgaacttccggcattaagaaagacttcactggcatctgatgctacactgggcgtaatggcagagggagaagatgtgctgaaaggtctgaagagtttccactccttgccttgcttcaatacttacctgcgtcagtcatattatgtggatgttttcaataaaggggcaagccctttgaaatggaaggcatctgttacggaaaattggattttattgagcaagaaggcaggcgaaacggctacggaagaacgtattgaagtatcggtagactgggcaaaagtaccggttggagagaaagttttcggggtattggaaattacttctgaccggggcgagaaagagaatgtttacatctctgtattcaatccttcttctccatcccttgccgaaatggatactttatttgtggaacataacggatatgtctctatcgatgcggcaagcttccaccggaaagtggaaaataaggcgatcaagatgagaaccattcctaatctggggatagagaatacggctattcagttgggtgatccgacggctgccccgcaacgtaccgcaggccgtagcacaccacgtttggagtatgatttctatactttcgagcaaggttcggttgatgtctatacatatgtgttgcctacattcgtgacaagcaaggacagaggctatgctggacacgaagcaacgaatatcgaaaccaaatatggtgtatgtattgacgaagggccggttttgaatccgtctacatcttcttttgaatatgcgcaaatctggtatgagagtgtattgaagaactgtagaatcaataaaacaactttgcatatcgacaagccgggtaagcataccgtgaaaataatctgtggagatgccggaactgtattgcaaaagattgtattggactttggaggaatgaaacgttcctactttggaccacaaccgacaagaaaatagagttgtttgatgaatatgtagttaaagattgccatggttgtatatgaccatgggtgatagggttaaccatgaaaaaacactttttacttttagtcttcctgctctttgctgcgattgttgaggctgctaatccggtaaagcaaatgttggaacgtcttcaggaaggactttccgaccggtttaagattgagatccgttcttcttctgatgaaggcgactactttgaactgtatggtggcgggcgcaaagtcacagtacatgccaacaattatgtaagtgctgcctttggcattaactggtatttgaagtattactgtcatgcccatgtctctttctgtggagaccagttacctcaattgcctgttgatctgccacaggtgaaagaacgtcatgcgactaaactatccgataatttttacatgaattattgcacatttagttatactacagccttttggaactggaaacgttgggaacgtgaaatagatctgatggctttgagcggtatcaatatgccgatggctatggttggggtggaggctgtatggcggaatacgttgttgaaattcgggtatacgcttccggaagtgaaggagttcttgtgtggaccagcttatttcggttggttgctgatgggtaatcttgagaatattggtggcccgttgcccgatgaatggtttaaggagcagatagtcttacagaagaaaatacttgcccgtatgcgtgaatatgggatgaagcctgtttttcagggattttttgggatggttccttcctcgttgaaagaaaaatatccggaagcccgcttggtggaacagggactgtggaactcgcttcaacgtcctcctgtgctcgatcctgccgatccgttgtttgaaagaatggcaaaggtgtggtatgctgaatatgagaagctttatgggaaagcggacttgtttggcggtgatctctttcacgaaggtggaaagaccggaggcattgacgtaacagatgccgcccgtcgggtacagacagccatgaaacgatataatccggatgcgacctgggtgattcaggcatggttgggaaatccgaaaaaggaattgctggcaggactcgacagaaagaatacgctgatcgttgatcttgctgccgagttttgggataactggcggaagcgcaagggctttgatggcttcccgtggttatggtcgcatatttccaattatggaggtaacattggtctgcacgggcgtctggacgctatagctaccggtccggtagatggtcagaaggattcggcggcatcaccgagcatgaaaggaactagctctaccccggaaggcatcgaggtgaatccggtagtatttgatttgttgaatgaaatgcgctggcgttcggagcatttggatctggatgtctggttgaaagagtattcagtgcgtcgttatggtgtggaagatgaaaatctgaaagaggcgtggactattttccaccgtacagcttatggtacttataccggtcatcgccgtccgtcagagtcggtcttttgtgcccctcccagcttgaaaagagataaaatcacggcttctgcctggagtcaatgtcggattttctatgatccggagctctttgcccagggagtaggattattcttgcaaagtgcagaccgtctgaagcagacgtcaacttatcagtatgatgcagtcgattttgtccgtcagtatcttgcggatttaggacgggaagcatattacaatctggtggatgcttatcgggcgaaagatacgaaacagtttgattactggtcggagaggtttctgcagctgattaaggatcaaaatgagttactgtccactcacgaatgcttcttcgtgggacgctggctggatatggcccgttcgaagtcaaaacagcctgaattgcaggatttgtatgagcacaatgcccgtatgctgatcgggacatggacggagacgcttagtccggtgcgcgactatgcccacaaggaatggggcggactgttgaaggattattatctgcctcgctggactaattacatcgcttatcttaaaggtacattggaaggacgttcacttactgttccggactcgtttcaagcggagaaggcatgggtgaatgcacataataagtatgtgcttgagactggtgttgatccggtggaaacagccaagagaatgtatcgtaaatatcatatttaatcactactcaaaaatagtactatgaaaggattgttgaaaacagctgtattattggctacattctgcgctacagccatggcctgtggaggtggtggagaggatgcattggatcataagggaggtgatggtggcggaactggtaataagggcgatcaagaagaaccggaacaaccatttgttgctcatattactcctgtcgacaaactcaatcaaggtgtcccggtgattaattcgcacgctgatgttacttcgcgttcgtccttgaagatgaactttcggacgtattcacaattgggagagagtgtactaaaatctgccaaacctaattatgtacgggttaagaaattggctaatgatggttatatcatgttctatcacaacaatcagattggtgccagttgttcttatgcgaccagtacggactttaaaacatggagttataaaggcaagctgtttacaaattacagtattatcgacagtaaaggtgaaaagaatgaccggcgttattcaaattgtgatgggctggtactttccaacggagatattctggccgtagcctcctatagggctaataatgggtatagagacttacctaatgatgcaggtattgaaatgagacgtagtaccgataatggcgttacgtggagtgaaccggtctcagtgtatcaaggtgtcaactgggagccgtatttgctggaattgtcctcgggagaaatccattgctatttcacggacagtagccgtacgggtattgaaggcaaagacaccggaactgcaatggtcatatccagagatggcggtcaaacgtggacgccttcatttggaagtatcccttactatgtgatacgaatgaagtgggaacaagacggaaaaacatacttcaatcatcagatgccgtctgttattcaacttaaaggtagtaatgaactggcggccgctgtagagactaataaccgtggaacatattatatatcactggcttattccggcgaagatggtgaatgggatcatcttgatgcggatcaggaaggaccggctgatagcgacaatttgtcttttttaggcagcgctccatatttatctcagtttccatcgggtgagactgtgctttcgtataacaaatcttctactttctatatgaaaatgggggatgccaaagcgcgtaattttggaagtgcttattcaccgttttcaggtaaggggtattggggaacgttgaatttggtaaatccgcatcaattggtgggagcgatgcctgatacttctaatggaacaatcatgttatcacaatttattcttaatcatcgtatcaatgcagtacgccgtaacgtaaaggtggatggcaacaataaggaatgggtgaatacggatcatgcgctttttgtcggagaaaaatcgcaagtgcagggaactctccgctgttcgtgtgatgataagaatgtatatttcctggtagaagtacttgaccggagcttgctgagaggtgattatgctactgtttatctctcttcgggtgatagtaaaagtttgacgaacggtgctaaacggctacaagtatcaatggatggattgaaaagtaccgaaacttatgccggcaagtggaacaatgcggagatgggggtggaagtgaaaacttatgtatgcaatgacaccaatgaagatcgtattgacaactatggttatattgccgaaatctctgtcccccgttccagcctgactatttcttcgggacaggtattggtcaatttctctattaccgacaataaagaagaggaagcagtcagtgatgtgtcttctataagccgttggataccggtggcgggattgtaatctgataataacatgaataattaattatatagaaacaattgtaatgatgaaaaagaactattatttaatttgtgtattgttactggctgctttctgtacaaccagtattgctactgctcaaaattattttggagattttcctgtaaaagcagatcctaagactgttggaaataaattgagcagacgcttgatggaaactaaacatcagctatattttgatagaggaatacattatgctgaagtatgtacatggtacggagctctccgttttgcagaattgacgaataacaaagagctgatcaagctattgagaaatcgtttcgaactattgttccacctggaaaaagaactccttcctccacccatacacgtagaccagaatatgtttggttgtctgcctctcagattttataatataacgaaggataaacgttatctggacctcggattgccttacgccgacactcaatgggagcttcctgccaatgcgaatgaagaagaacgtaaatgggataaaaaaggatattcctggcaaactcgtctttggattgacgatatgtatatgattactatcgtacagtctgaggcttataaggctaccggtgatcctaaatacatcaatagggctgccaaagaaatggtgctgtatctggacgagctgcaacatcctaacggccttttctaccatgcaccggatgtgccttactattggggacgcggagatggctggatggctgtgggtatgacagagcttctgttcaacctgccgaaaaatgatccgaatagagaccggataatgaaaggctatcttttgatgatgaataacctgaagaaatatgtgaacaaggacggactgtggaatcagctgatagaccagcccgacttttggactgaaacatccggatctgcaatgtttacctatgctatgatcttgggtgttcagaacggatggttggataaagaagaatttgctcctgttgcacgcagagcttggttgggcctgtgcaattatatagatgataagaatgaccttaccgaagtttgtatcggaacgggaaagaaaaacagtaagcaatattatatggaccgtcctcgcattgccggagattatcatggacaggcacctattttgtggtgtgcttatgctttgctgaacaataagtaaaagacagatatattttgttgtataaaaggagaggatgtccccactgattggagacatcctctttctctaaatataacgatataaaatgattccttatactgtcgggtccggtgcttcatcactaccgtcattaccgccttcgtttcctccgccttcttcaccaccacctgaaggagcagaactgctgtttctggttacatccagtttctgaatgctgacagactttatcatatttttcagcaagtctcccggagtaaagatgattttacggtttttcaatgtttccgtagtgacttcctctgcgttttcctggctcttgcatccgaaggagggacggaaagttccaaattcccccaagttgacggatgctccgatttccatgtacgttatcaaagaatcaatgagtccgtcgaggacggcttttactgtaccgcgtggaacgaatcctactttggttacctgatcgcacagcatcttaaaatcaacgttgactacattgaacggacgcgctacatatttttcagctttggtatcgtcgaaaccaaaggtcgtttttttgactacatatttcagtgccataattttaattttttaaatagtttataaatcgagtttctgttttgtgatcacaatgcaaagatatggcaactgaaattactgtgcaagttatttttcggaagtgcgttaaacaaataattaatattgcgtatgttgttgataatgaacgtcgtttttcgctgtaagcttgccttgtagtgtgatagtactattagaaaaactacttctttagatatacgacagtttttcctcccccatacttccggattatctcttctttcaagaacttgttgagtaattcaattgctttgttgcggctgatttctgccaatttcataaaatcggaacgggtgatacagccatgtttgtccagatgttgtatcaggagggtgcggcatctttcctcattggaatcgttattagtacgatagggtgactctatgcgttccagttgcaatggttccagactctcacgaaactttttgttaatgcgcaggttcaccttatttaaatggatggaaggagaacgaatttctttcttctccatcaccggacggtcacatgtcagtgatagggagaaatgtccgatttccccgacttctacggtccagccttgcgcgagccagtgttgtagctcatcactgacggcttgcaggcaaccttctatcgtggctggactgaagccgttggatttggatactagttcaatgaacttatcggcatcaatggtgcctgatggaataacacgtgcataaagtgcctgttgttcctcctttttctgtggattcccactcgtgtataaatcgtaataaacgctcatagttactttatatttttcttgttctacagataatttctttctcttcataaattaattcgttcgcctataggcaaacgcaacatcgcctataggcaaacttgcgtccggctataggcggatgaaagaatgcctatagccggacgaattaatttatgcactcaaaggtattacttttttcggagaaggggcttagttttttcagttgaacgcttaaagtttgatagattacttgaaaatgagattcttatcttgcagatatcatttttgcagaactttattttgagaatgaccaaatctttgcctttattggacggtatgtttcatctttttcagtttgatatacctatatttgtatatcactaaatgatatggtttgtgccgggattcagagattgtttaagctgtgatataactttattatttagattaatcgataataggatagataatatatgataatttgatattgataatgaagcgattaacctttgtagtgttttttctgatacaaatattgtttgagttacaagcacaaagttatgaagaactaggcgatatttttgttcatagtgcttataccttaagtcggaatcaagtgaagtatacgcaacctgctgattttgatttagtacggtctggaaaagactatttggaatgttttcattcggagaagtatactagtttcaatcctgcttctttgactaattttgtagataaacttatttcaaaagataagaattttgttgtatttattgaaatacctcctgtttttagtcgggattctgtgtatatagatgcagaccttttacctgatttggaacaggaaataaatacgagtcattgcaaggatatacgatttgatttccgttggaatacagggcagaatctttcattggatcagtgcccaatcagctataaatcttctgattatgcccgaagtgcatttaatgctgatacggtacttacttatcctctgaaaatatggaagaaatatgaaaataaatataataactgtcaggcaatggttatacagaaaaatactcgggggtatatctgtttgtatattttctacaatgataaagggaagaagaattttgaatactatatgaaatcacttaatggagtgttttggtatcgtgatcctaaggattatattgagtttgttgaaccgaaacaggattctgttatttatattggtcatcgtaaggaggttgatgctcgggtttattattccgctcacaatgaaattactttagaactgatgaattttcggtataatgaaatagtgtcgttattggatcaagggagctttattaagttttataaagccgatgaactatataaattggataagataaagaaatatgaattagttgcaactgactcaatgaatgtgcttgctaaaatagcttccggtaaggtttatttgctaaaatataaagtggatgcaccggattatcagaaagtatatctgcaaatgaagtattcacgtaattttgtttctcctccagcggattgcgactggaaatgttatactgatacatttaatattttgccctatagaagcaggagaacacgcttagatgaaaatatgattgttcgaaaagaaaaattgagcggtgaacatgtttatgataaattagagtgaatgccggaatttccaggtggagaacaggcattgcttcattatttagcggagcagacaagtgtatatgcttcatcacatgaacaagaatatctacgtgtaagagtaattgtagaaaaggaaggagaaataacacatccttattttattttggataggaatcctttaggtaagaatcctttttttcgaaaagcggcattagagattattcaaaaaatgcctaaatggaaacctggattaaaagatggtaaggtagtacgttcttattatactatacctattatgtttaaattgaagtagagtgtttaaggttagtgattttgaaagagaaatatgcggtgattttcaattaggatttgaatatgaggaagatgaaaaagataatttatctattactagtttcacttttaatattgtcctgtgggatgagaaataaaaaagaagtaactcagcaactgccagtaagagaattcactaaattggaagaactttgcttgctgccttatgattcagtgttggattattgtgacttgtcggatgatagtattgtagattttatagtgccaaagaattacgtgttttcatttcttctgtcatagaaaatcactattagttattactttacaagtttttattctacaaaaatgagtgtttcgtccataaatcacaataaattgtgacttatattgctttttccatatccgaaactctatttttttaatttccgatttgtaaacttgaaaccttttgtatttacgaacacttcttataatttgtataaatagtaatttgtctctatatttatgaattgtttaacttttaaatataattgctatgagacagaatttatttttaggatggaacatcctcttggcaatgttgtttacgttttattcatgtagtaatgaaatggatagcgattttgaaagtgatgaagaggctgtgaatttgaagttgagtacggacagtgtattaacaagaagtaatccatgggatgaggaagaaactcctttagagtgggctgagaacgaggatggaactggaccattttctgctggtgtattatatttttattttgataagaagcctgggaaccaagatgaggatcattctgtatattatacatattttgattggggagcgggctttgatagggaagatgctggagatgaggtagcgcaaaagtattatatacaatttcaatggagtcatagtgattatttcccagaatggcattacatcaatatgccaaataatgaatatggacttgtaaaagtacttcactctgatgttcttgaggatattcccgcatatgctttcccatataaaataagcggagaacctatttatgtgcgagtgaggtcggttcataaagattttataacatcagccccaataccagaaacagagatccgatataaatatgatcgtaatttattttcgccttggagctatccgcctgttcccatagatgaatattataattattggggatatggtagaccacagccagaacctaatgaaggtgatgataatgaagaggaaattcagaatgctactattgttgtgagagtttatttaccttatgaaataggttatcctaagaaatatacatatacatatgagataatgaatatgactggaggctatgtgcagtatcttactggtacacctaatgcagtaggagtcagtaaatctatagccgatgtggtaggggagaaaggaggaagtatggaagtttttgctacaaggagagataattcgacaaatgagaatgcttattctagtcaaatgattaattatggtacaggtgaaagagaaattgaagtattttttacggagtctgattttgaacgttgatggattcttatgcatttaactgaatagaatagcaggtagccattcagctacctgctataattacttatatcttttttattttattaaaattgatgatgtagtatatgagaatttctagtacttattgttatgtcttttggggtatgaaataattcatcagattggttttattattaacttgtttgatttgtttgtactaggcaatgtaatttctaataatccttgatggtaaaccttgctttccaccactttcccattgaaagcaacctgataatctttctccggattcatgcaaacaagaattgttcgctgatgaggaactgttgaatcatcaaaagctatttctgcctgatactgtgtataatcatcattgaaatgactgttggaaatccatacctcgaagccggttgaaactttccctatccgatagtatgtagcaaaccagttgagtatgggagatgataaaccggagaattgatgccatccggctccacgttgtgaggagataatgaagtgttcgaaggtataataactctccttacattctttctcccatgtatttaatgctgtagttgctacttgataggctttttctccttctccaagatccagcaaggctttccacaccatccattgatgaggaaaccaaacggctccattccaataaccgtctgtacgataataaggtgcagactggtctactgtagaaattcctacttctgtccacatctcgtcaggagaaaatacatggtttatcattctgcgtgtttgctctttggaagagatgtttgcaataagcgggcttactccgtccagtcctttattaaagttggaaccatctttatatcgatagatgcctttaggtttgccatcgttatcgtgcattacatatccgaaataaccggtttcctcatcccatgaataggtttgtaatgcatttgacagctgtttgatggtttgctcatactcttttacatcttttttaagccctagttcttttgctgctaaacgtaaaattttagcagctcggatataataagccgaagatactaccggagtaacagaagccttgtcgcgtaaagcatgttgaggcggataatcatcccatcctcctgaattatagaagtaatcccatgttcgtagcagaccagaacctttcattcgggttgtggagtagaggttcttgcctgtcataaaatcaaagaactgcttcagtcgtgggtatagaaattgcaatgcttcttttgactgtgtattattccataaatcgtaataggcatacatctgtatgggcaatggagtgccatgatgaataaatgcggattcactgcctacaggagttgtataagctctgatacactcaaaagccttagtaatatccacatctattaatcccagagctatgaaaccggaatcccatgtataaaggctattccaatttttgccgggcgtaaaatgccggatatattgcccttgggtatggacgggataaacaatgttggataataatgctgattgcagcaagcgacgtccgaattcatactttttgccatctgctaatattctgtcttcagagttattcgaatccttttgtattaatgaagtcagagtttccggtgtggaatgaaacttttgaatctgttcattgacttgttgtgatgttccggtacagactaaggcgtatatagtctgttcggagtgaggtgccaagacaattgggcgtagaaaagcattagaataatgccactctctgtttcctattagtctcgatgatacatggtcgtgagtctttttgcggaagaaagattccagattgttatccagaacttcccgaatctgagattcttggtaattccatgctattccataatagttatcacattccggatattttaagataaaatcttgtttcgtttttcccaatttaatttcgggaataaaagaaagcttcctaggcagtatcttgatttgcttaatatcttcttcgctaccgataaagaaaccatctaaatcagtactgtgagtaccctctgaaattaattttagcgtatattttcctggttctttgcaagtataggggattgagactatgttatattctccggtgccttgtagctctaggcggctttcggttattccttttacttgaaaagtgcttgtttttcctttaggagtattgtatctaaatcctatcattcctttttcttttccaggtagaatatttatttcatagtttactttgtctcccttatcttttccaaatccttttcctagaacaaaaccactgagtgattgagaagttcgcatttcgttccttttccatccgtcgtatactaaattgtactgtggagatttgcgtacaggttcatttgatatataattgattgcgttatgccactgtatatttgaatctttagggattttgaactgaggttgttctccttcataatcgatatatgccatcaaattgagaacgagattttgattaacagcggtattattgacacaattcatgcctaccagtgttcggtgttcatctaatatataataggtgacatcagtaaatactcggtctttccactccatttcatagcggtatgtgatgtggctcatggatgaattgatatcccatgggtaataagatgattcgaaaagcacatgaggaaccagttgacgattgcggtaatagcctggcattacagagaaatcgaaacgcatcccggctttcatatcgggtatatgtgagattcctgcgtatcgcttagagtaaggcccccaagcttgcagtgaggtgatgtcgtgactatcggtaaaacatgatggagggatcgttggctgtcccaatgcagatgttatccaaaacataatcattagtaacatcattaaagattgcttagttttcatattagagtttaaaatggttcgttgtaacaaaggtaagacttttgattttttagaaagatagaaactgttcaataaaaagtataaattgtccataatgcaaataattggtcattataatttagtgaagtctttcttattagttgttaaaaacgctttgggactaattttccatttattgacctgtttgtatcactctaaatgcaacagaatttctacttttgtgtcgttcataaaaactattatggtcattttatgtgagtacttgataaaataaaataaagaaggtaaagaatataacgattgttttttgaagtatagttaaaaagaatgtttgaaggataacacatttattttttaatcatatgtcgtacaaggagcttgtattgagttccaacttaaatcttatgaaatgaataacaagtcaattgaaaaaacaagtatcactcgtcgtacacatcgttttatatatatgctgacagggatacttttgcttctatcgtgcggatcggataacaataatccgactgaggatccgggaaatactacgaattactacctacaattacaaccgaatggtctgaatgcaattagggtttcttgtacagaagaaaactttgtgtttcctttccaaatcaaggttatagggaatggaactaataaagggtttaaagctcaaataaacccatggagtgaggatgaactgaaagcatataataataaggagaaaacttcttatgtacttttgccctcatcgttgtattctctgacttctacagaacaggttttcaaagaaggagtttcagttatggatgtagaggttagctttaatccgtctaaagtatttgctgaatttagggaaaaaggcgctgaatatgtcattgctttaaaacttagtagtgataaaattcaggtacgagatagtcagagcgaaatattacttggcatttcttatgattatccaacagcttcttttgctacctcttttgtagaggttagtgtcaataaagatgtgattcctgtatctattgctgcatcacttgattatacaatagatgggataccaacagctaatccttgggattttgtctgtggtttcgttctgccatctaatgctgaagaattggttgcagaatataataaagtctataaaacttcatatcaacttctgcccgcaagtaattatgatttaggtgagggtgtgtcttttaaggctggtgaaactcaagctaatggagaaattacaattaagcgtgaaggaatggctgttgtggattatttattaccattgcaacttggcgagtgctctaacaatggagttatttgccaggaagagatatgctatcttaaggtagggcgtacatatactaatccaattatatcagataaaagtgtaccggaccctacggtaattcgcgctaatgacgggtatttttatttatatgctactcaaactagcacttattggatgccgatttatcgttcgaaagatctagtaaattgggaatatcaaaagacagcctttacacaggctactaagccatctttatcaggtggaggtgctttttgggctccagaaatgacatatattaatgggaaatatgttctttacttttcatgggctaagatgaatggagcggatgttagctatacggctgtagctgtttctgattctcctttaggtcctttcccgaacagtaaggcgttaattactaatgaagagtttggttctaatgtaattgaccagttttattatgaggaaaatggaaagaaatacatgttttttggaagtttcaagggaatttatgtaacggaacttacagatgatggtctttctgttaaacgtgatgtggatggtaagcctgttttgaagaaacaagtttgtggtaatgcatttgaggggacaaatatttataagaagaatggttattattatttatttgcttccattggtaactgttgtaatggtattaatagcagttataaagtggtagttggtcgttctaaagatttattaggtccttatgtagataagaaaggaaaaggcatgcttgataatagttgggaacttgtgttagaaggggatggacagaaatggatcggaccggggcataattctattattatacaagatgatgaaggtacagactggatgatttatcatagttatatgaaagatgcaaatggtggcgtcggtggacgcttgggaatgctagaccgagtattgtggactaatgacggttggccatacatcaagaattgtgttccttctaattcaggattgataccggtatttaattctaataattgaaatcgagatatatttattaacatttaaaatcaatgtattatgaaaatgaaaacaaagaatcatgtttggcattttttgtggggattgttggcattggttagtttctgtttcgtcagttgtaaagatgatgacgaaggaggagaacagccctttgacccaagcaagcctgtagttatttctgattttactccaaaagaagggggcttaggaagccgtttggtcttatatggagataattttggaaatgatgtttcaaaagtaaaagtgacgattggtggacaaacagcaagcgtgattggaatcaaaaatcataatttgtattgtttcgttccagcaagggcttatgatggagatattgaagtgagcattttggatgatagaggtgaagagattgcctatgctgaggcagaagaaaattttgtctataagaaaaagatgttggtaactacacttataggtgaaacagacccggagatagcggatgaaaataaaaattttgatgtaaaagatggtccatggggcgattgtggaggtttggaaaaaatggaatggatggtttttgaccctaataataaggataaattgtatgtttgtggtggggcaaaaacacatcgggttgttgatttttcaaagaagacattaggaaccattgcgtttacaggtgaggcggctggagaatgtaatattttgagcttcagtaataatggagagttaattgttgttcggaatataacgacagacaataaaaatggtatattcttttattctcctgaatcaaatttcactacacaaacaaaggctctttatgctcgaggatgtagagcggcaattcctcatcctgtgaatggagaaatatacacatctaggtatgataaagggtggattggtagatatgatccagaaacgggagagtataatccaagtttcttacaaatgtatcgtgctagccttgacttatatgttgtaatacatccaacagggaactatatgtatatcatggtgagaaatagacataccatttatcgggcggattataactgggaaacaaaaacatttgggactccttatctagcttgtggcaaagatggtacatcggcttgtgaagatggagtaggtagtatggttcgattaaaccaacctcaacaaggatgttttgtaaaaaatcctgattatgaggggcaggcggatgagtacgatttttatttcgtagataagcagaatcattgtgttcgagttatgacaccggctggaaaagtaactttgtatgccggacgtccgaatggggatggaactaaaggatttaatgatggagatttgcgtacacaggctcgttttaattatccagcgagcattgtatacgatgaagtgaggggatgcctcttagtgggagactctaataatcaccgtatacgtaagattgctttagaggagtaataatgataaacacatataatataatgaaacattttttattaacatgtttgttgttgctaggattctctggctttgtttttgcacaagagaatattgtagtaacaggtatcgtgactgatacgaacaaagaacctatgattggtgtaaatgtatctgttgcagatatgcctggtttgggagccattacagatataaatggaaaatattcgttaaagacacctccgtatcataaaatcgtgttttcatatatcggttatgagaagttggaagtattggtaaaagaacagcgtgtagttaatgttgtaatgaaggagtctagtgctacatctattgacgaagttgttattactggaaccggtatacaaaaaaaacttacggtcacgggggctattacaaatgttgatgtagaagagctgaaaacaactccaagtacatctatggcagatgccttagcaggagttgtaccgggtattcaggctatgcaggctaatggacgcccaggtactgtttcagagttctggatacgtagtatttctacatttggtgctaatagttcagcgttggttttagttgatggctttgaacgagatttgaacgaagttaatgtggaggatgtagaatcatttagtgtattgaaagatgcttctgccaccgcaatttatggtagtaaaggtgctaatggggtagttttaatcaatactcgtcgtggtaaagaaggtaaaattaatattaatgcaaaagtggaggggtttgcatccatgcctactaaacttcctgaatttgtggatggatatacttatgcatcaatggcaaatgaggcaaaattagcacgtaatgaagaacctctctatcagccggaagagctagaagttttccgtttagggcttgatccggatttatatccagatgtagactggatggatttaatgttacgtgatgtatcttatagttcccgtgtgtcactgaatatgactggtggaggtaaaactgctcggtattatgtaggaggtagttatcaaaatcaacagggtatatacaagactgataaatcattgaaagactataataccaatgcaaactttcggaaatggacctatcgtatgaatgtggatattgatataacaaaaacgactcttttgaaagttggtgtttctggatcattacgtcaacagaatgatccgggagtagggacagatgctatatggacaacattgatgggctataattctattatgatgccagtgacgtattcgaatggcaagatcccttcttggagtgagaaagaagataatataaatccatatactcaggctacacaaacaggttttaatgagagttggaaaaataatattcaaacgaatgtgacattagaacagaaattagactttatcactaagggacttaggtttattggaaggtttggatatgatacggaaaattcgaattggataaagcgagtgaaatggccggagttatggaaggctcattcataccggaattctgatggaacattagagtttgatcgtgtttcaccagaaaagaaaatgactcaaacatccgggtcggacggtatacggaatgaattcttcgaatgggaattgcattatgaacgtggatttaacaaccatcatactggagccgtagtgaaatatacacaatcctccaaagtctctaatcaaaatatcggtactgagctaaagaatgctattgcccgtcgtaatcaaggacttgcggggcgtgttaattataattggaactatcgttattttattgattttaattttggatatacaggttctgagaattttcataaagatcaccgttttggctttttccctgctgtttctggcgcatggaatattgcggaagaaacttttatgaagggattaacatggcttaatatgtttaaagtccgttattcttggggtaaaacaggtaatgatatcttgaaaaaagatcttcgttttccttacttgtatacaatcgaaactatgatgacggatgagaatgaacctaaacctacaggaggatatcagtttgcggatgtcggttatgacagatattatggaggtatgcgttattcatcattagcctcgactaatgtctcatgggaaatttctactaaacaggatttgggtattgatttttcactttttaatgataagttgacaggtgaaatcgattattataaagagaaaagagaaggtatttatatggagcgtgcctatttaccttggatcgttggtttggaaagtaagccatctgctaatgttggagtagtaaaagcagaaggatttgatggtcgttttacttttaaacaaaaggttgataaggtgaacctgacaatacgcggaaacatgacttatggtaagaatgagatcgtggaacgcgatgaagaaaatagtatctattggtacaagatgcaggaaggacatcgtgtgaatcaggcaatgggactggtttcactgggtctgttcaaggactatgaagaaattcgtaattggccaaaacaatttggtgaggttatgccgggtgatattaagtataaagatattaatggagatggtgtaattgatgataatgataaagtggctattggatctactacaaagcctaattttacttatggttttggtgcatctgctcaatggaaagggttggatgcgagtgtgcattttcaaggtgtaggcaaatcttcttactttataaacggttccactgtctatatgttttctggtggtgatggttggggaaatgtattgaaggaaatggccaatagtaaccgatgggttttgggagtaaatgaagatccgaatgccgattatcctcgtttaacttacgggaataattctaataataatcgtgcttctaccttctggcttagaaatgggtcttatcttcgtctgaaaaccttggatgtaggttattcacttccaacggcactagtacgtaaggctcatttgaataaggtacgtttcttttttaccgctacaaatctgcttactttttcaagttttaagctttgggatcctgaaatgggaagttcggatggaaagaaatatccgcttaataaaactttctctttaggagtatctgttaatttataaaaatgaacatgtatatgaaaaaactgatagtaattttatcctttacagtaggattgatttctttggtaggatgctctgattatttggactcagattacatctttgatgagcgtatgtctatagacgatgtctttcataataaagattatactaataattggttagcaagaggttatgcttttcttgctaatggttatttgcaagatgttggtagtaagaagaatgttccttttaattttgcagatgatatgtattattgggaggattctgatgctagtggttacagaaagtggaaaagtgggcgatataatgaaaatggggtatatggttcgagttcgggtatttggcagaacgcttataagggaattcgtcaagtatctatctttctgaataatattgataaaaatgaattgtttactccggaagaaatttcagactttaaagggcaagctcattttctcagagcttatttttattggttgacacttcgggcgtttggacctgtgccaattattccggatgagggaatagattatactcaggaatatgatgagctagcctatcctcgtaattcttatgacgaatgtgtggaatatattactgacgaactaacgaaagctgcaagtgttttacctcttcagcgaggagttcaagagattactcgtccaactcgtggagctgcattagctttacgtgctaaagttcttctgtatgcagctagtccattatttaatggtaaggctccagatgttgtatcatcggctttgataaataaaaatggaaaacgtttgcttccggaatcctatgatgaatctaaatgggcaaaagcagcggctgctgctaaagatgtgatggatttgaatatctatggattacatgtggctaattataatgctagtgaaggaaatattgcttatcccaaaacaatagctccgccggctgatggtgatttttccgaacaggattggccaaatggttggagaaacatagatccttttcaatcgtatcgtgaattgtttgacggctctatcatagccagtcagaacgaagaactgatttttactcgtggtataaatcagggtaatgaaggaataggtattatggtagttcatcagttaccacgaagtggtggtgggggatatggttcgcatggtatgacacaaaaacagtgtgatgcatattatatgaacgatggtgaagattgtccgggtatgaatgatatgtatagaggctatgcaggatatgaaggacgttacaacacagatcctagaccggcaggttatgtggaagcaagtgaacttgcacagtatccggaattaggaccgttaggtgagggtgtatccaaacaatatgtgaggcgcgaaccacgattttatgcttcagttgcttataatggaagtacatggcactttctgaatgcggaggatagtaaaaacgaggaaaagaatattcctatattttattatcggggaggctataaagggtataacaatggatatacaagtggttatactcttcagacaggtattggagtaaagaagtatgtgcatccggatgatattagttatacggagaaaaccgcttatgatcaaactcgtctagagaagaaaacagatccggctattcgttatgcggaaattctaatgatttatgcggaggccctaaacgaattaacgggatcttatgacattccttcatgggatggaaataaagttcattctgttagtcgcgatattaatgaaatgaaaaaaggtattcgtccggttcgttgtcgtgcaggattgcctgattatagtatggaagtatatagtagtcaagacaaattccgtactaaactgaaacgtgaatggcagattgaattttttgctgaagggcatcgttactgggatttgcgtcgctggatggatgctccagtagaagaggctactcctgtgtatggttgcaatatgttagctacggaagcgatgaaagatcagtttcatactccgacaatgtgtacgacattgccaactatttttgctaccaagatgtggctatggccgattaatcatgaagagctaaaacataatataaacttaattcagaatccgggttggacaaatcctgaataatctttttaaaatcagaaagatgaaaaatatatattatctatttttagggttgatgaccattatggggttcgcagcctgcaataatgaatgggaagatgagcagtatttattacaggcatctttcaaagcgaatgtcactgaccaaggtgtgacgacaacttatgtacgtttcaattctggtggagtagtcaaatataaccttccgattttgatgagtggttcaactgtaaatacacaaaatcgaactattcatattggtttggatcctgatacattggcagtactgaatgaagaacagtatggccatcgtgaagaactttattttcggcagttgcccaatcaatattataatatgccggaaactgtggaaatgttagctggagaatcattggcggtacttcctgttgagttcacattggatgagtcattagatcagtcggataagtgggtgttgccattgcagatattgacagatccgtcttatgattatcaggtcaatcctagaaagtattatcggagagcaatgttgcaccttcttccattcaatgactattcgggtttgtatgatgcaagtcagtacaagtgttatctagaaggagataaaacggttcctttgactgttgagtcaacacgggcatatgtggtagatgataatacgatttttatttatgccggaacgagagatattgattatttggatcgtaaacaatataaggtttttattcgatttacggacgagattgtcgatttgcagactaaaaaactggaagtgtggtcggataatgatgaaatagaattgactactaatgggatacagagttattcaataagtgaggaaatggatccattgaaggtttatctgaagaaaatatttattactctcaacttgaactactcttttaaggatattactcagattccgggatcgtctattaattatcaggtagaaggatcattgtcgatgttacgtcagcttaatactttgatccctgacgaagatcagcaaatccaatggtaaaaacatggaattttagactttgttgaataatgaaggaggactcgttggaaggaagagtcctccttataatattatgaactatatgcgatacagaatatgtttgaaaatgtggtttattttaggtgctatatgtttaatgtcatgtagcggtggtaatgattcattggctgatacaaatatagaaaaagaggatggacagaaaactgtaattatagaacctatttcaggttttgtagcaaaagaaactaatagagcaaatgaattattattagaatggaagaatccttccaatattgcgattgttgaaatactttattctctgaaaggaaaagaggaactttctgaagctataaatgtacgggtatatggtgagagaaacagttcatatactcttaaattagtggaatatgggatttatcaggttagtgccgtggctattgacaattatgggaagcgttctgagaaagtaactatattggctactccagctaaagaagatacaattgatccggatattatagtagaaaataaattgcctattgctgacccttttgtattgtactatgaaggtaaatactatgcatatggcactcgtgttaatggttttgaagtgtatatctctgaagacttgaaacaatggaaacgaaatgatattaaagctttgtcaccggaaaattcttggggaacgagatggtattgggctccggaagtgtattatgtgaagtcgaagaatctattttatatgttttattcagtggatgaacatatctgtgtagctacttctactagcccggaaggtccattcgtacaaagagaaaagaaacctattgtagcggatgaaaaaggaattgatacttcgtttttcatagatgatgatggtactccttatctctattatgtgcgttttattgggggaaatgtaatttgggtagcagaaatgaatgatgacctgaccagcataaaaaaagaaacattgactaaatgtataagtgctactgagccttgggagaaaaaacaaggaacgattgccgaaggtccttcgttgttgaaaaaaggagatacatattatttaatatattcggcaaaccattatgaaagtaaagattatgctgtgggatatgcaacggctagttctcctaaaggaccttggaccaagtatagtggaaatccgattctccgaagagacaaagaggccgctaagtctgtaggactggttggtacagggcatggagcaccttttgtctgtgcagatggaagttataaatatatctttcatgctcatgcaagtgagactagtgtaggtcctcgcacttcctacatcagtaacttcaatatctccgataaaggagtaattagtattacaggagaaacaattgaaccggtgagaataaaataaccatataaaccaagaataccatgaaatataatagctggatacacgatatagcgaaagcgctgtgttgcatatttctgatacagacatcaggaggtatgctttatagttgctccagtgaagatgaagaatctgtgccaccagctcaggaaggtacgggaaatgacgaaaaggaaaaatacacctatgtgtatcagttgaaggcagataattataatatgccgacagagggtactatctctccggaatatgatgactctcctgagggaaaagatattagcaatttggttgatggagactgggcaacttctttttatactcctaataattctgtctctatcatctggaagggaaaagagccggttgtagcacgttattattcggttatggcaaccggagataaagaaggaaatgcacctggtgcctggtctctttacggatcgaatgataaggagaaatggatggagctggacaatagagtccggcagaagttcgagaaaacggaaaagaaatttatggcgttaaacaataacgaagcttatcaatattataaattgaccattcatcagaatcaaggcggcgaaggggtggaaatcttggaatggatgttgcagactaagcggacaattgatactcccttactgactgattttccggaagggagtactcctaaggagataggcaaacggctgggaaggctttttgcgaaaggaaagcataatggaaaaactctcagttatccggaaacttttacttggaacggagcattgaaatatgcggaagtagcaaaagacaatgaactgatccagcctttaaaagatgggtttgagtctttctttactactgataagagctttttgcctgggatggatcatgttgaccggaatatgtttggtagtcttcctctgacgttgtatctgatcactaaagacgaacgatatcgggaaatgggtatgccttatgcagatacccaatgggaagtaccggaaaatgcaagtgcaagtgcgaagtcatgggcagcgaagggatatagttggcaaactcgcttgtggattgacgatatgtatatgattcctgtcattcaaacgaatgcttataaagtgaccggtgaattgaaatacgttgagcgtgctgctaaagaaatggcgatgtatctggatgagttacaacgtacgaatgggctcttctatcatgcaccggatgtaccctatttttggggaagaggaaatggatggatggcggcagggatggcagaagtgcttcgctatctgccggaatcgagcccatatcatttgcctattgtaagaggtttccagcgtatgatggtaagtctgaaaaattatcaaacagaagagggcatgtggagacagttgattgataaaccggattgctgggtagaaacatcgggctcggctatgtttacttacgcgtttattatgggagtgaaatatggatggttaccggtaaaagagtatggtgaagctgctcgaagagcatggttggctatgcttacttatataaactcgaacgataaagtaagagaagtgtgtgtcggtaccaacaaaaagaacgacatgcagtattattatgatcgtccgcgtaatacgggagattatcatggacatgcaccctatctttggtgtacggttgctcttctggaaaaataacgatgaatacgggcaattctgtcttttattcaagtattttgggactaaaatcttatttattgacctgtttttggcatgttgaataaaaggaaatctctacttttgttccatgccaaaaaccatttaaaactataacataaatatgcacaactttgttaagacccttttttctgttttgctactacttttctgttcagtattgactgcacaaaataggatgaatgacgccagagaccctaatcgtatctggcttgattcggaagtcacccatcatggagattatcagtggaaaatgataaaagcaggcgataccacagatccgggtgagaaaatatcttcatcagattatccgacagaaaaatggttgccagccattgttcccggtacagtcttaaattctttggtgtataatcagaaatatcccgaaccttattatggagtcaataataaacttgaatcaaagttgattcctgatctctctcaggtcggacgtgacttttatacttattggttccgtacagagtttgcagtacctcagtcttttaaggggaagaatgtttggttgcagctggacggtatcaattatcgggcagaagtatgggtgaatgggaatttgctgagtaccatcaatggtatgttcatacaggactatatcaatgtgaccgattttgtaaagataggaaagaataatgcactggctgtcaaagtgtatccggttgatgttcccggaagtactaagccgaagtcttggggggctgccggagaattccataatggtggtaacggtaatatcggattgaatactacgatgttgatgactgtaggctgggactttacctttatggatggtatccgtgatcgtaatacaggtatctggaaaaatatttctatctatgctaccggaaaggtagctctacgtcatccgtttattaagtctgaattgcgcaaaccggattacgaccaggcgcgtgagaccgtatctgtagaagtgatcaatccgtcaactagcaatagtggtattaattgcaaagtaaaaggtgagattgttggtgagaatatatcctttgagaaatcattccgggtgattcggggagaacaaaaactggttactttttctccggaagagtttccgcaacttgtgatgaattctcctcgcttgtggtggccggtcaacaaaggaccgcaaaacttatatgatttgaagttgaccgtatcggttgacggagtggtttgtgattccgtaaagacgagatttggcattcgtgaaatcacttccgatactaaaacaccggacaaatcacgtgtcttttatgtaaatggcaaacgattgtttatccgtggtacgaactggataccggaagctatgttgagacactctgatgagcgtacgtatgctgaattgcgctatactcgccagtcgggcgtcaaccttctgcgtatgtggggaggtggcattgccgaatctgactatttcttccagctttgtgatgaattgggcttgctggtatggcaggaattctggatgacaggggatactcgtcatcctcatgacaaggctctctatatgagtaacgtggagtctacagtgaagcgtattcgtaatcatccgtctttggcttattatgttgcttccaatgaaagcacagaaatgaccggaactcccgaactgctgaatcagctggatggtacacgtggatatcagatgcagtcggagtgtgccggagtacatgatggcagcccttacaaacaggtgaatccgatgcagcattatgaaaatacagcttctccacgaggtagtcgtgtagatggctttaatcctgaatatggtgcaccgactcttcctacagtagaaatactccgggaaatgatggatgagaaagacctgtggcctatcaacaaagaagtgtgggattacttggatggaaacggtttccatctgatgactaccatgtatacagacttggtgaatcattatggaaagtcatcttcgattgatgaatttgctcagaaaggacaactgctgggtgcaataaactctaagagcatctgggaagtatggaactataataagctggattatggcgaccgtttttgttcgggccttttgttttggtatcataactgttctatgaggcaggtagcttcccgtatgtgggactggtctctggagccgacagcttcgctttatcacacggccaattctttggagcctttgcatgctcagttcgattatcttaaaaatacggtttccgtagtgaatgatttctatcgttctttcgataactacaaggttacagcacaggtgtatgatataaatagccggaaggtgtttgaagaatcggctgctgttaatctaccggctgatggagtagcgaatgatgcgttgactattcgttttcccgaagacatctctcaggttcactttatcaaattaatactgaaagatgagaaagggaaagacgtttcttctaatttttactggcgttccaacgataagtacgaaggaaagacgaccttgaccggtccggtagcctctggctttgaggatttgagtaaacttcggacttctaaagtgaaactggcttataaggtgagggaagaaggtgataactattttgttgatatcactatgaggaatacatccaatcagatagctttcttcaatcaactgcaattccttaatgcaaagatgagtccgatacggccgtcattctatacggataacttcttctccctgactccgggtgaaaagaagacggtaacgatcgagacggcaaaggagaaactgggtgaaggagcaatattggtattaaaaggatggaatatcgatagccaaaagtataaacttaagtaagatgaaacttaaatttatggctgcattgataggcggattgtttaattgagtgttagtgaatcggacaaaggaactaatgttcaccaaatgataaatagaatactatgacttctagaagagaattcttaaaaaaagcagggctgttgaccgcagctttcactgtacctactctcaatacgcagggagaaacaacgcaatccaggctgagtctgaagaatacaaagattgccgtagatgatcggtgggatgttattgtagttggcggagggcctggcggttgtgctgccgctatctcggcagcacgcgaaggggccaagactctattgattgaagcaatggggcaacttggcgggatgggcacagccggtatggttccggcatggtgtccgttttctgatggtgagaagattatttatagaggtctggcagagaaaatttttgaagcttcgaggaaaggagtaccgcatgagagaaaacagaaaatgaattgggtgagtataaatcccgaatatctgatgacagtttatgatcagatggttgctgaatcgggagcccgagtactcttcttctcaagagttgctgctgtagaaaaagcagccgatgaaacggtagacgctatcattgtcgcaaataaatccgggcttgttgctttcaaggcaaaagtttttattgatgcgacaggtgacggggatttggcggcatgggcaggcgcatcattcaagagaggagatgatagtggggtggtacagagctcatctttatgcttctcgtttgctaatgtcgatagctataactacaatctgacagggccctcattacatactagtaataagaacagccctgtttataaagcgattgagtctggaaaatatccattgatagataagcattttaatagtaattttattggtccggatgtggtgcagttcaatgccggacatcttgctaatgtcgattcaactgatccttgggcgactacgcaggcaatgatggtaggtcggcaaattgcaggacaatatttggaagcaatgaaggatgttcagcccaaaacttttggtagtgcttttttggtgaagactgcttctttgcttggagtcagagatagccgtcggattgaaggtgattatacttttacggtagaggactggaaagaacgtagaacttttgaggatgaaatcggacgtaactgttattatatagatgttcataagcccggtcataaagagacacgttataaaaaaggagaatctcatggaatcccttatcgttgcctgacacctaaaggactgaaaaatgtattgactgcaggacgctgtatatctactgatgaagaagcattcgggagtttacgggtaatgcctccttgtctggtgactggcgaagctgccggaatggctgcagtgcatgctataaaacaggcaaagaatgatgtccacaaaatcgatactgattatctgcgtaaaagattgaaggaggagggacaatatttgctgtaaaggtaaatgatttattatgaataaagcaggaaaataagatgaaactaaaactcgtaattagtctgaccggtatattgatgttatatggatttaccatgaaaccttctacggatacgactacaggtaaggaggataacagaagttgggtactcggtcccttcgtacgtcctgaaggtgctaatcccgtaatttcacctcaacctacttctttttattgtccgatgcagaagcaacaggtgaagtgggaagagagtgatacattcaatccggcggctaccgtgaaagacgggaaaatagtcgtactttaccgggcagaagataattcggcacagggcatcggtaaaaggacttcacgtatcggatatgctgagagcacggatggagtcacaatgacaagactggacactccggtattatttccagcggaagataactttaaaggtatagaatggccgggtggttgtgaagacccgcgtgtagcaatgacagaagacggactgtatgtgatgctctatacggcatggaaccggaagacaccgcgcatcgctgtagccacctcccgggatctgaaaaactggacaaagcatggacttgcttttgaaaaggcatataatggacgcttcactaagatagccagtaaatccgcttctatattgaccaaagtaaagaaagaaaagttggttattgataaagtagacggcaagtatttcatgtactggggagagtatgctgttcacgcggctacttctgacaaccttgtagactggtatccggtactggacgaaaagaatgaattaaagaagttggcgagaccgcgtaaagggcattttgactgtcagatgacagaatgcggacctccggctatacgaaccaaaaagggtattgtgcttctgtataatggaaaaaatgcaggaaaggacagggatacctcatatccggcaggtgcttattgcgccggacaatttttatttgataataatgatccttataaagtactggaccggttggacaaacctttctttgtgcctgaagcaccttttgagaagagcgggcaatacaaagatggaacagtatttatcgagggactggcatattacaagaagaagttatatctttattatggttgtgcggactcaagaatagcagtggccgtgtgcgacaatgtaaagaacctgaaggttaaataactcccgtagatattctataattgtataataaataaaaataagtcgttatgtgtaaaaaactacttttattattgctcttgttaccttttcaactattatcagctcagactaaattgctgacggacttcccggaaggatacactcccgaagaggtcggtaagcgtttggcataccgctttgtaggtgagaagcacgcacttcatgccggtaaatggattggatatccggaaacattctactggaatggcgcgctgaaatatgctgcggtaacaaaagataaagagttgataaagcttctggaagataagtttgcccctttgtttacatcagagaaggcgctgcagccgattatgaatcatgtggatttgaatatgttcggcagccttccactggatatgtaccgagtgacaaaggataagaaatacctgtatcttggactgccttatgccgactctcagtgggaagttcccgcaaatgcaaagcctaaagaaaaggaatgggctgaaaaagggtattcctggcagacacgtttgtggattgatgatatgtacatgattacgattgtgcagactcatgcgtataaagtgacgaaggaccgtaaatatatcgaccgcgcagcgaaagaaatggtgatgtacctggatgaattgcaacgcccgaatggtcttttctatcatgcaccggatgttcctttctattggggacgtgggaacggatggatggcggcgggtatgtcggaactgctccgttgtttgccaaagaagcacaaagaccgtgcccgtatcttggaaggctatcagaaaatgatgaaaagcctgaaggagtatcagaatgcagatggcttgtggaatcagttgattgacaagtctgattgctggacagagtcatccggatcggctatgtttactttcgcattcattatgggggtgaagaatggctggctggatgcggaagagtatgcacctgctgcccgaaaagcctggctggcattggttccgtacgttaatgaaaagaatcaggtcagagaagtctgtgtcggaaccaataaaaagaatgatctacagtactattatgatcgtcctcgtcgtactggtgattatcatggacaaggtcccgttctttggtgtactgtcgctcttctggaaaaataacagagtatttccttattcttgttttattgccgcataaatcaaggagaatcatagtccgtagtttcccttttgagaaagggaagctgcggatgcttttatcataacggatacggttgcatgagactggatcttcagatatcggcactcgatgaacaggcaaaaaggacgtaatatgttctgttttggtactattttactcattctacattcatttagaacgaattcttttactaattgctcaatttgttttactgagataaggtgatcttcgctaattttgtccttgttgataagagccggtaatggcttgggaaatatatctaaataaagtattaacagaatcaggattagtgctgattcatataattatgatgagctgtatgaacttaaaattcttgctttgtggaatagctatcgggctattgaccgggtctgcctgggccgttaattatacaccggaacaggtcaatgcacatatttctttgaaagtgcccggaaataaggctaagcagtaccctttaattttaaagagaacgcagaatgataattctgcctatcagttagtagcctctgaaaatattccgctgacgatttctcaaaaggtcaaggaagctaatgggcgtctacatattgacatgtgtattacagctctggaggatgtgtactttaactatggacagaatgtgtctaccggtttccgtcacgacgattgcttgttttacatgcccggattttggtatcgccgtaatctgcgctcgcccaaagaagctccttcattccatacatctgatagttgggtagtccgtgaggatagattgagtgctccattgacgggaatctataatgagaaggacaagcgatatatgacagtaaaccgactggataagtttacgaccgacgctttgactacacataaggaaggtgaagtgattctttccggaaaaacatccttgggttttacaggttttgaaaatcagaatggagtggctgcgctttctttcggtttcccctatgaagaagctcccagaagttatatccgtaaactgacattggctcctaaagtaaaagctttccaactgctgaagaaaggggaaaacatcatgttaacttgggaaatttcggaaaacagtgcggatgacttctccgattttgtacgtcatgcctgggaatattcttatgatacttatgctccgaaaccggttgacactccttactccatttctgatatgaagcagacgctcagcaattactttgtgaatagcttggtaagcaagccggagttgacctataattcgggcgtcggtctgcgaacagatgactgtaagagtaacggtgaagcggaaattggtttcgtgggacgtgtgctcttgaactcgttcaatgcttgggaatatggctgggaaaccaatcgtgaagaactgaaggaaaatagtcttaagatctttgacagttatctgaagaatggatttacaccggcgggtttctttaaggaatttgttaatttaaaccgtgggtttgaagaaccggtacatagtattcgacgtcaatctgaaggaatttatgcgatacttcattttctggcatacgaaaagaaacagggacgcaagtacccggagtgggaacagcgggtcaaacagatgtttgaaatgttcctgaaacttcagaacgctgacggcagcttccccagaaaattccgtgatgactttacgattgtggataagagcggaggtagtactccttcagcaacattgccactagtgctgggatataaatacttcaaggacaaacgctatcttgccagcgccagaaagacagctgaatatcttgagaaagaactgatctccaaagcagactatttctcttctacacttgatgcgaactgcgaggacaaagaagcatcgctgtatgcagccactgctacatactatctttcactgattacgaaaggcgaagaacataagcattatgctgacctgacaaagaaggccgcctactttgccctgtcatggtattatctgtgggatgttccgtttgctccgggacagatgttgggagacattggcatgaaaacccgcggttggggaaatgtgtcagtggaaaataatcatatcgatgtatttgtttttgaatttgctgacgtgcttcgttggttgtccaaagaatacaaagagaaccgcttgtctgattttgcagaggtgatctcgacttccatgcgtcagttgctgcctcatgagggtcatatgtgcggcattgctaaggtcggttattatcctgaagtggttcagcacaccaactgggattatggaaagaatggaaaaggatattacaacgatatttttgctcccggctggacggttgcttccttatgggaactttatactcccggacgtgcggagactttcctgaagaaataaaacagtacaggttgtgtcctgcagaaaccttttaaattatatcatgatgaaacaatttattatcttattagtcgtgttttttaattgttcgtatctgcctgctcagtggaaaccggcaggagaacggattaaaacagaatgggctaccaaaatagacgttgagaatgtgttgcccgagtatccccgtccgattatggaacgtccgaactgggtgaacctgaatgggttgtggaattacgccataacttcggtagggcaggcggctcctcaaaaatatgagggacagatcctggttccttttgcgatagaatccagcttgtccggtgtaggaaaaagactcggaaaggagaatgacttgtggtaccaacgcaaattctctgtgccgtcaaaatggaaaggcgaacgtgtattgctgcattttggagctgttgactggaaaacagatatttgggtaaatcaaattaaaataggacagcatactggtggctttactcctttctcattcgatatcactcctgccttgaagaatggagagaatgaactggtagtaaaggtttgggacccgacggataatggtactcagcctagaggaaaacaagtgaataagccctccggtatctggtatacgccggttagtggaatatggcagacagtatggctggaacctgtgcctgcacagtctatcacgaacatcaaaacaactcctgatatcgatctgaataaactgacagtagaagttgctactgatgagaagaagctatcggacaaaatagaagtgaaggtgttcgatggaaaggaactggtggctaaaggagtttccattaatggtattcctgttgaaatagccatgccggctgatgtgaagttatggtcaccggagtccccttctttgtatgatctggagatcagcctgttcgaaggcaataagctggtggataaggtcaagagttatgctgccatgcgtaaattctctaccaagagagacaagaacggcattgtgcgcttgcagttgaataataaggaccagttccagttcggtcctttagatcaaggctggtggcccgatgggctgtatacggctccttgtgatgaggcattggtatatgatattcaaaagacaaaagactttggttataacatgatccgtaaacatatcaaggtggaaccggctcgttggtatacgcattgcgaccgtctggggattattgtatggcaagatatgccgagcggagataagaatccggaatggcagatgcgcgagtattttacaggaacggagaagaaacgttccacagaatcagaagcaacctatcgaaaagaatggaaagaaatcatcgattgtctttattcttatccttgtattggtacatgggtaccgtttaatgaagcctggggacagttcaagactcctgaaattgcagaatggaccaaacaatatgacccttcacgcctggtgaatcctgccagtggtggtaatcattatacttgtggtgatatgcttgacttgcaccattatccggggccggaaatgtttctgtatgacgcccagcgtgctacagtgctcggagaatatggtggtatcggtctggtattgaaagagcatctatgggaaccggatcgtaactggggatatgttcagtttaatacttctaaggaggcaaccgataaatatatggaatatgccaatgtcttgaaagaactgattccccgtggattctcggctgctgtctatactcagactacagatgtggaagtagaagtaaacggattattgacttatgaccgtaaggttatcaagctggatgagaaaacattgaggaagatgaataaggagatctgtgatgctctgaaataacaggttccatttactcatgatatttatctgattgttggtatggggtggactaaaaaaaatctttttagcccgccctgtgtcattattgatggttaaggtgcagaacataactgttttgcccgaaaaaataagtaactttgtctgcaattataaacttaaaaagtctgtctatgataaagaaagggatgaacgctcttttgcttctttgcatcctgttggtttgcaacggaaaaagtggtgcaatggagaaagaaggaaacaatgctccggagaaaaaagtgagtgttgagtcagatcgtctgcctattgctgatccgtatgtgatgctttataataacaagtattatgcctatggtaccggtggcacaacgaaaggtgaaggtttcgcctgtttttcttcggacgatttgaagaactggaaacgggagggacaagcgttgtcggcagccgattcatacgggaagtggggcttttgggcaccagaggtttactatatcgaatcgaaaaagaaattttatatgttctattcggtagaagagcatatctgtgtggctacttccgactcccctgtaggcccgttccggcaggaagtgaaacaacctgtttgggaggagaaaagcattgatacttccctctttatagatgacgatggtactccctatctttattttgtgcgttttaccgatggaaatgttatttgggtagctcggatgaccgatgatttgatgaagattaaaacggagacattatctcaatgtgtgaaagcggaagcaccgtgggaacttttgcaggctaaagtagcagaaggaccttcagtcctcaagaagaatggaacatattatctgatctattctgccaaccattatcagaataagggctatggagtgggctatgccacttccaagtcaccaatgggaccatggattaagtatagcaagaatccgcttctgcaaggagttgagggcatgggattggtcggtacggggcatggcgcgccttttcaatgcaaagatggcagctggaaatacattttccatgcccactggagcaaagagaaaatacatccgcgtacttcctatttcaaggatttcgctatctcagatcagggagtggtttctattagcggagaggtcattgaaccgagagtcatgaaataatcgcttgaatacttgaaaatacagcaggtacttgacaaacgcttttaaatgttgtatatttgtagatcaatagcataaacctataaaaaaacagatgaaagaaaaaagtaaaatcatattcctgaatggtataatatagcaacaagtatggactatcttcctgagatacatcagatgatagagtatcagatataggctgaaggctgcagactttatgaagtttgcagccttttttgtcttaaaaacttaatgattttattgtgaatttcatttcgggagtttataataaacggtggggacgtttattataaacgatcatggaatttattataaacgtataggttggtatatataaacttgttgctattttttatataactacaattgtctttctttgataatgattgttgttggtaattatcgcagacatactgtgtggtaatctaagtaaacaaaatattggaactgctatagggtatataactggatgcctgtttaattcactcgaatctctcttttttcgaaaaaagaggaattaaatctgagcagttttgattttggatacatatatcgtagcagttttgatattcgtattttaattttccaatctattggttttagagaaatacatgttaaatgtagttcgaaaaatagaacattaagatggaggatacatgcaaacgatttagaaaaactatgtatttttgtgttataactttcaaaacagtataagaagctttactcattttaatgcagaattgacttgtttgcgagtttaagcataaatggttatttttattatattgacgaattagtgcttgatttaggataaaacaaacaatttattgttggaattctttaattatttatataagggcaactaaagaatcattttaaaatttaaagaattctataagtaaagaacattttatacttttgcactgttttgaataaaaaattaacaggtttaaagtagaattatggcatctataaagttattgctcaataaacagcgaatgcttaataatggtacatttccattggtttttcagtttatccaccggaggcgaaagttactttattataccaagtatcatatctttcagcaacaactggctgatggagctttggaggttgagtattgtgaagcatcgctttattccatgaaagaaataaaggagataaatcgtgagttgaaacgggactataagcgattccagaatcgtatattggagttggaaaggaacaatgaggagtatttagtagatgatatcgtagagtttaaaaagaagaagagtcatcgttcgtatctacttatgcagtatatagaaacacagatttcttataaaaaaaagatggggaaagacggtattgcagccgcctatcatagcacctatatttctctgaaaaaatatataggtatgaaatctgcgcgtaagtcggatatcaggatggaggaaataaacttcagctttgtggtagggtatgaggactatttgaatgcacaaggactggcgaggaatacgattaattattatctgcgtaatttccgaacgatttataattcctctatccgggatggatttaagcctaaaagcgagaatccttttacttacattcagacaaaaccatgcaagacaataaaacgtgcaattaataaagatgatatgaagaaactttcttcgcttattttacctgttcattctggaatggacattgcgcgggatatgtatttatttagcttctatgcccaaggtatggctttcgttgatattgtatttctaaaaaagaagaatattcgtgatggtatattgagctatcgacgtcataagtcacaacagctgattcatatagttgtcactcctcagatgcaggaattgattgataaatatgcgaatgacagtgaatatgtgtttccaattattgatacatctttgtcgacatctatctacgatcagtatcgtttggctttaggcagggtgaatcgatatttgaagaagatcacttttcggttaaatataaatgtccggctgacgacttatactgcccgtcatacctgggctacattggcaagagaaagtggggctcctatttccatcatcagtgcaggattagggcatacctcagaagaaatgacgagagtatatcttaaagaattcgatcaggaaacgctggcacaggtaaatcgtattgtgactaatctgttgtaatatgaaacataaatttgttcttcaaattttgtaaaactcatatttataacttatatttgtaaacggtatctattttgtaatagagagtatatcaatcgcttaataatagcgatgttgcaaaataagactattttttgcgaatagctattatcaaaaagtacattaatactctccttttgtacactctcgtaattctccttgaagattattggttttcgcctgataatggtctatcagttgcttgggagtacagcgaaaatgctgtttgaagtagcggtataactgagcttgcgattcaaagttgcatacctccattagttgcttgacacatatgcccggttctataactttccctaaaatacgtacctttaattgtttcatcatccattgttttgcggtaattccgaattcttctttgaatttaataaagaagctggttcttcctatatttgatagtgtaattaactcatcaagattatttacccttgaatagttctgcatgacaaaatctctgaactctaattgcttcccaatgatagggtgaaaaagtgtagcaatttcttttttattatagaatcctctgagtaggaagaaaaattcacgttctattacattatgtaggtatgtgcagttcatttcattcctcaaacagtgaacaacagtttcaaagaacggcattagtggatagcgcatggggatagggctgaaatcatagttaatattttcacaaatagagctcaaaccttgaaataaaagtttgtcacagttgctttgcggtatatcaaatgccatagccaacatttgtgatttggctgttgcggaaatctttatcattgaagatttaggtaacactaccatctcattgctatgaaatgtgtggttacaaaattggttacagtatactgaaaaatctccttttaaaaaaaataaaagataattcttgtgggtatactcttcttctatgcatttctctttatcgaatttaatatatttgaatcctgtactaatatctgtcatgtaatttttgcatgacaaatgttcccctgcgtaaagtaatccattgggtgattgttcccctctcatatctttcccttttttgatgacaacaaagcgattctatttcattctgcttcataattgattcagtatggtttaatataatcgatttgttgtcaatgtgttatgatgaataattctatagcctattatgcatctgcagggtatgaaacataatgtatggtatatgattatgcgtaaatccctgctaatcaattgtatatatacaatataaacatctttactctctattacaaaatagagagtaaagatataggggaattatatgtaattaaaacgctgtttatcagttgattgggcgattgtcttgttgtggaatagtatggctgtaaaatcaggccggatgattcttactaaatgaaaagtagaaaaacgacagcacttatttgttggaaaaagtggattatggaatgaattatttttttatagcaatagcatttttagttgcggtatttatggggtggattatcactcctcagattttactcgttgcttttagaaaacgactgtttgattctgttggtggtcgtaaaacccataacggtatagtaccgcgtttgggaggagtcgtgttcgtcccagtgcaatgctttctattagtgctatctatgttttttatgtataagctagaaatgacgccccatcttcaagacccatttatacctttccaatttttattgctgatgattgggttgcttattctgagtatggtcggagtgatagatgatttgatcaggattgattatcgcagaaaatttgtagctcagattgttgcttctttatttcttccgttatccggactctggattaatgatttgtatggactactcggaataactactttgtctccttggatcgggatgcctttgacggtatttgtggctgtctttattattaacgccgttaatttgattgatggaatcgacgggctttgttccggtttggtcggtatgggcgctttggtttttggttttttatttatttataatggagcatggttacatgcagtttttgcctttattaccgcaggggtgctatgcccttttttctattacaatgtatttggcaaatcaaaagggaggcaacgaatttttatgggagatactggtagtctgacgttaggactttccatggcttttctggcaatcagctatgcgatgaataatccattgataaagcctttttcggaaggagcgatagtggtttcttttgcaacattgattgtacctctttttgatgtggttcgtgtggtatggatacgctatcgtagccatcagccgttcttcatgcccgatcagaatcatatacaccataagttcttgagaatggggttatctcattatgctacaatggctcttattttggctttagcatttttcttaagtttcttcaatatcatagcagtagagtatatcagtaataatattgtgatttttatagatattgtattatgggttgctttccacttatggttggacaggcgggaactcattcgaacgaaacatgggatagtaaatgattaaaaataataatatgagaatagctgttattggtggttccggattcgtgggtagtcgtttgataggtctgttacagactgtcccggacattgaactgctgaatattgacaaacaacagagtgaactttatcctcatctgacgcaactagccgatgtgcttgatggacgcaagctgaaagaactgttagcggggattgatcttgtggttttattagctgcagaacataaggataatgtgactccgacatcactttactatacggtgaatgtggaaggaatgcgtaatacgcttcaggctatggagagtaatggagttacacggctggtgtttaccagttctgttgcagtttatggcttaaataaagataatccatcggagttacatccggctgacccgtttaatgactacggtcgtagcaagtggcaggcagaatgtctgttgcaggagtggtatgatacgcatcgggagtggaacataaatatccttcgtcctacggttatatttggagaaggaaatagggggaatgtatataatttgctgcgtcaaatcacttcgggaagatttctgatggttggaaatggcgaaaaccggaagtcgatggcctatgtcggtaatgtggcatcttttatcacttttctgattgaaaataaaaaagagggatataatgtattcaattatatcgataagccggacttcacaatgaatgatttggtgtaccatgtcggggatgtgttgaataagcatattcctaccacgcattatccttattggctaggaatgtttgggggatattgctttgatactttggccatgataaccgggaaaaaactatcagtaagttccgttcgtgtgaagaaattttgtgcggtgactcagtttgattctgtcaaagtgcaggagtccggttttagaccggctttcacaatggaagaggggctgacacggacgttacaatacgaatttggctccgaagtcagatcagagaagtgctgaattgataaactaagcttttccctgtcttgaaagaaagagaaggggggaagagtagatataatataaaaagttaggggtagccttcatgtatgtgactggcgggagcggagcgcgcttttgaggtacctttttatgagtgtaaattatcgaattggaggagttttatggatgaaataaagagttggctggttgtttgtgtgcagagcaacagagagaagaagacttatgaacgtcttaaggcattgggatatgattcttttcttccgttacaggaagaaacacatcgttggagtgatcggagcaagaaagtgcagcgggtcgtgattcctatggtggtttttgtgcgtataagtccttctgaacgcattcctgtgctccgtcttccctcagtcagtcgctttatggtattgcgtggagaaagtactccggctatcatcccggatgctcagatggaacgtttccgctttatgctggattattcggaagaagcggttgaaatgtgttcggagcgtatccagccgggtgaacaggtaaaagttatcaaaggtccgttgacaggattaacaggtgagttgataacaatgggtggaaagagtaaagtagccgtaaggattcatatactgggagccgcgatggtagaagtaccggtagggtttgtggagagaatatgataatgtctgttatttgtttctaggaaaaacgactgatattacaaggtacaatggaacggcagattacagtaacatcccctttattaccatccttggaggagttggatatttacttgcgagatatttggcatcgtaagtcgatcactaacaatgggtattatcatcaagagttggaagatgctttgtgtgaatatctgggagtaccctatatcagcctgtttactaacggaactcttcctttaactgcagctttacaagcaatgcgtattactggggaagtgataactactccttttagctttgttgccactacacattcgctgtggctgagtggtatcaaaccggtatttgtggatatagatcccgtaacctgtaatcttgatccgggtaagatagaagcagctatcactccttatacaacagccatcatgcctgttcatgtgtatgggcatccttgtgatattaaaagtatccaggagattgcagataagtatggattgaaggttatctatgatgcggctcatgcattcggggtagagattaatgggagatccgttctgaatgcgggtgatatgtctgcgttgagtttccatgcgacaaaggtatttaatacgattgagggaggtgcattggtagttcacgatgcgcatacgaaaaagagaattgattacttgaaaaattttggttttgccagtgaaacggaagttgtagttcccggtaccaatgctaagatggatgagatacgggcggcttatggattgctgaatttaaagtctgtagatatggcaattgaggcgcgtcgtcaggctacgctcaaatatagggaagcgttacgtaatgtttctggtatcacactttttgatgatatgtccggcgtgaaacataactactcttattttcccatatttgtcgatgaggaaagatatggtatgagtcgtgacgaactctattttaagatgaaggagcatcaggtactggggcggaggtatttttatccgctgattagtactttctctacttatcgtgaattaaagtcggcgcagaaagagaatctgcctgttgctacaaagattgcggaacaggtgatctgtttgccgatgcatcatgcattgagtgaagaagatatggaacgggtattccggttaatcagaaaatagcaggatatgaaacttggtattatgcagccctacttcatgccctatatcggctacttccagttaatgaaagcggtagataaatatgttgtctatgatgatgtaaattacattaagggtggatgggccaatcgtaatcatatactgataaatggtgaaaaagaaatgttcactgtcactttgcagaaagcaagtccgaataagttgtttaatgagattgtgataggtgatgactttaagaaattgatgaagacacttcagatgaactattccagagctattaattttgatcagacaatggtactgatggaaagaatcatttcttttccaaacaagcagcttgcagtattcatagccaatagtttccgggaaatactcagttatttgtctgtagaaacagagatactgatgtcttcggagattcccaaagataattctctgaggggaaaggataagattatacagatatgtgaaatattaggtgctgatacttattataacgctgttggcgggaaaaacctttatgatcaagaggaattcagggaacatggtattacgttgaatttcgtggattctcttcctcaggtatactctcagttgcatactagagaatttgtctcaggcttgtcaatgattgatgtattgatgaataatacaaaagacaaggtaaatagcctgttggaatcttatcagataaaatattgaataactgaatatatggatatgctcattagtaccacccctttgtcatttactgaatttagtgattttgtgattgcttctgtggactggtttattccatctttacatgaattatcggatttgaatggatggattttgaaaatgtacttgaatgggtcgatgttttattcaaaatcagaatctgaaataacagggcttgttgttacttattacaatacctcaaagaatttcgtatatatcccatatatttgtgtacacttggattatcaggggcatggaattgcaagtcagcttattgattatgttgtgtcgcaacttgcatcacacgtatatggaatatatctggaagtaagaaagggcaataagggagctgttcgtctatataagaaacttggattttgtgagtttgaagacagaggagtaaagtatttgatgaaaaaagaaatacaaaaatgaatgtttgattttaccttatggaaaatacccatttattagttagtgtactttgttgcacgtacaatcatgaatcatatattgctcaatgcttggatggatttcttatgcagaaaacagatttcttatttgaagtattggtttatgacgatgcatcgacagataatgctcctgccattattcgtgagtatgaacggaaataccctttgatcataaaaccgatatatcaaacggaaaatcaatattcaaaaggggtaaagattgatttggtttacaatcattcacgggtcaaggggaaatatgtggcgttttgtgaaggggatgattattggactgatccgtacaagctacaaaagcaagttgatttcttagaaaaccattcagaatatgccatatgttcacatcggtataagcaatattttcagaaggaagggaggatgaacgctgaaatctatcctgtccgtatatcggatggaatgtcctttgatctgtcttttttgattcgtggaggttggctatttcagccattaagtgtaatgtttcgaaggtcggcattagagttggaggagtattcaaaatatgaaatacatatagatgttgtctggctctattctattctgaagcgagggaaaggatattgtatgcctgatgtgatgggagtatatagaatacatgatgctggtgtatggtccagcctcaatttgaatcatcagcggatattttcgttaagggcgagaaaagccatttatgatttggagaaaacagatgaggcagccttgttcatactggcacaattctctcgtccgatggggcggttgcaggtttttaaagagtgctcgttatttgtaagaatcactaagatattaatcatccattttggatattgttttatgatgagaacatggtttgatcgattctttctgaataaaaagctgtgtgtggatgagttttatcagatagaagatttctgtaaaaaaaataaaggcagataacattatagaagtattaaattcaaatttgttattaaaatgaatatagcattaattcttgcagggggatctggtaatcgaatggggcaggatattccgaaacagtttatacatgtggataactgtccggtaatagtgcataccatgttggcttttcagaagcatccggatataaatgctattgctgtggtttgtttaaggggatgggaaactgtgttgtcttcatatgcgcatcagtataacgtgacaaagttacgctggatgtttcccggtggtgcgaatgggcaggagtcaatttgtaatggtatatatggtttaaaaaacatagatgtgaaggatgacgatctggttttaatacatgatgctgttcgtccattggtatctcaaagtatcatatcttctaatattgctacctgcaaacactatggatatgccattacaggaatccgatgccgggaagctattttagagagtgaggatggtttctactctacaacgagcatttcgagggataaactgataaggactcaaacacctcagactttccggctggaagatattataaatgctcatgagaaagcaaaggagaaaggtatcgtgaactctgtttcttcatgtactcttttggcagaactgggagggtatgaaatgcatatcgtcccgggagaaggacgaaatataaagattactactacagaagacttggaaatcttcaaagttatgctgcaaacctccaaagaagaatggttgaaatgataacttattacgatgatatcaggaaagtcagggaattggagttgccatgggaaactctgaatgaggcgaatatattgataacaggagcctcagggttgataggaagggcattggtggacgcactgatgcagttaccggataagacgttccatctttatgcaggggcacgtgactgggattatgcgcgaaactgtttcttacaatacaaggatacagattcttttaccttgatacaatgtgatgtgaccatgccgatatcatctgatatagattttcactatatcatccatgcggcgagctatgctggtccggatgcctttcaaagtgatccggtcggtgttatgaaagcaaatatctggggagttgatcatttattctcatacggaagacagcatcatctgagaaaatttctgtacgtatcttccggtgaagtatatggggaaggcaatggaatacctttccgtgaagaagatagtggttgtcttaactggacttcattgagagcatgctatcctacggcaaaacggactgctgaaacgttgtgtatttcttatgcatcccaatgtcaaatagaaaccttaataatacgtccttgtcatatttacggaccatttttcactcctaaggatgatcgtgtctacgcacagctaatccgaaatgcggtagctgatgaagacatactattgaaaagtacgggattgcggcaacgttcctggtgttatgtggtcgattgtgtctttgcgcttctttacgttttgctgaaaggcgaaacggggaatgcgtataatatagcagatgttcggtcgaataccagtatctgcgaatttgcagagatggttgcattgaagagtgggcggaaagtggtttttgacataccggataatgctgtgagtaatcctcctgacatatcaaagacgatattgagtacagataaaataaatgaaataggctggtttcctctgtggaaccttgaagaaggtatttcacatacactcaatactttcgtttagagtctggagatttgtttatggaaatgatttataaactgctgcgctcattgaaatggacttgttccaggtttctctatatgaataccttaaaaatgagaattcgtaaggtaaggcagaaagagaatatacgagtcttgtttgctgttgctgagactgcaacctggaagaatgatactctctataaagcaatgttgaaacaccccagatttactcctttactccttattttaccggatgagcaaaaggaggcaaatttgtcgaaagaagaagtagatttatgttttgatttcttttgtaaaagaggatatgcttgtagctatccctatcagaatggaaaactgataaatattcggaaagtattgaagccggatattattttttatcagaaaccttataaagcttatcctcgtagtttgttgtattataaaaacatgaatgccttattctgttataccaattatgcctttcatagtctgttggaggaatgggctaatgaaaatgcttttttcagattggtgtggcagaattattatgagaatgagtctgcttatgctgatttgaagaagaaattttcagaggtatcatcgaatgtagtagttacgggattgcctgttacagacttgtttctgaacagaaaaaaacacgaggatagatggaaagagacagataaaaagcgtaaacggattatttgggcaccacatttttccatatctggtgatggttgtctgaattattctactttcttgtctgttgcggaagatatgctggagtttgtaaagaatacccggttacctattcagatggcttttaaaccccatcctttattaaagagtgaactatatacttatcccttatggggaaaagagaaaacagaccgatattattcagaatgggagtcactgtcgaatgctcaattggaaactggcaaatatgttgatttattcatgacttcggatgctatgatccatgattgtggatctttcaccattgaatatcattatacgttgaaacctgtgatgtaccttgtcaaaggagaagagcataccaagatgatgaacgcttttgcaaaagaggcctatgacttacattataaaggcaggaatatgcaggatatccgaaagtttatagaagatgtggtattggaggattctgattacttgttggaaagacgaaagttgttttttaaatcatatctattacctcccaatcatcagtcggcaactgagaatattattcaggctattttagggatcggatattatgcagaaaaaaacagtacaggataatgatatccgttcacagagcttttccggagtgaaatgggcttctatagggcatttctcttcgcagggaataagttttgtgttaggacttgttttggcccgtttgcttttgccttcagattatggcatattagggatgctcggagtgtttacagcatttgccggatcatttgtagattgcggatttggctctgctttgatacgcaaactgactcgtacggaggcagattgctccactgtcttttattataatctgggtgcgagtatattggtatatataattctgtactgtagtgcacctctaatagctggtttttataaccagccgttattgataaatgtagtgaggatagcttgcctgacattaccgataggtgctttatgctcggtacacagtaatctcctgtattgtcagttgagatttaaagatattgcgataggtaacatatcagctgcttttttctcaggatgtatcggtttgtttttggcttataatgattatggggtttgggcattggtatgtcagggaatcgttgcgtccttggtgagttgctgttatctgtggatgatttccagttggaaaccgctttggatattttctgtcagttcttttaaggagttgtttggttatggtagtaaattgatgttgtccggttggcttaatatcatatatgttcaattatctccattaattatcggacggttttattcttcgtctgctttgggctactatacccgggcgcagagttatgcgtatttcccgagtagtaatataatggggatattgcagcaggtcgtttttcctgttttgtcaaggttacaggatgaagacgagcagctgatagcggtttatcggaaatatattaagatatgtgctgtttttatattttgcggaatgtcagttcttgctgcgttgtccaagcctttggttatcttttttctgacggataagtggctgccatgtgtgtcgattatgatgcttctatgtttttcatttatgttttcatttgtgaatacgataaatttatctcttttacaggttaaaggacgatcggacttattcctgaaattagagattgctaaaaaggctgtctctattattatgattttgcttagtgctccgtggggaatcatggcaatgtgctggtcaatagtcatctatactcagattgctatttttattaatacgtattatacaggaagactttttcatttgggatatcgggaacagttggctgattttcttccatatttcatattagcgcttattgccaatattccggcctatatgctgacttatacgtctttgtctgccggaatacaactggtattaggaactttaataagtttatccgtctatatcttgttattaaaaataaagcatgatgagatgtattttttggtgaaacggattttattaaactatggcagaagaaaggtgggggaatgagaatgtacgcaggtgcatgcgttaattagactggaagaagatggccgctgcacaatcagaaaacataaagaggatagctaagaacacgttattactttatatccggatgttatttggaatgttagtttcactttatacttcgcgagtgattcttaatacattgggggtagaagattatggtatttataatgttgtcggtggagtagttgctatgttctcaataatttccaattctttgtcggtggcagtgagccggtttctgacatttgaattgggaacgggaaacaggaataagttacaaagaatattttcgacttcgttaattatacacattgcgctggcgataattattttagttgcagcggagagtataggggtgtggtttttgaatacgcggatgaatattccggcagatagaatgtatgcagccaattgggtgttacaatgttctatattatcatttatgttcaatctggtaagtgtaccttataatgctttgattgtagctcatgaaagaatgaaggtctttgcatatattggaatactggatgtattgttacgtttggccgtggtgctgtccttggcttatatgtttgacgaggcggataagttgataacatattcactgatgttagtctgtgttggcattttcttgcagggtgtttatgtcgtttattgtagagagtattttgaggaatgtcgctttcaaagaacggttgacagggctctgctaaaagaaatgacgggatttgccggatggaattttatcggtgcgtcttcgagcatattaaaagaacagggagtgaatatcgttttaaatatatttggtggtccttcgttgaatgctgccagaggaatcgctgctcaggtgaattcagccatcagtggttttgtgagtaatttcatgattgctttgaatccccagatcaccaagctgtatgcatctggagaatatgggtatatgatttcattgatatatcgtggagcacgtttttctttttatatgctattgtttttgtcattaccgatcatattgaatactcattatgtactgatgttatggctgaatattgttccggaacatgtggtatggttcgtgcggttagtgctcatctccgcaatgtgcgaatcaatctctaatccattgattacagcgatgctggcaacaggtaatatacgcaattatcaaatcatagtcggcgggttgcaaatgatgaatttacctgtttcttatgttctgttacggatggggttctttccggaagttgtattggtagtggctattgttatttcattatgctgtctgtttgcccggcttatacttttgcgtggaatgataaatctgtcagctagatcctatttgttgcatgttttagggaatgtgcttgttgtatctgtgctttcactggtctttccgtgggtcgttagcggatatcttaaagatgattttacaggtttcttattatcgtgtctggtctctatggttaatacaggcttcgtgatatattatattggatgcactcgtagtgaacgtttgtttataaagggaaaaatcgtcggcataaaatgccgcatattgggaaatgataaaactggagaataaggaagattgttgcggttgtacagcttgtgcaagtgtctgttcgcattcggccatttcaatgcagcctgattgtttaggctttttatatccggttgtcaatgaagaaaactgtgtgcagtgtggattatgcgagaaggtctgtgctttcaataaagattattccaagggactgaacttacagaaaccggatgtctatgctgttcggcataaagagatgaaagaaatagaaggcagtcgtagtggggctatgtttgttgccatttccgattctgtattagataaggggggagtggtctatggtgtaggatacacaggccatttccgtgtttcacataaacgtgcgtctacaagaaaggaacgggatgaattcagaggaagcaagtatgtgcaaagtgacctgaatggaatatttgtacaagtaaaagatgatctgaaacaagggcttcatgttttgttttcaggtactccttgtcagacttcgggtttatattcttacttatcactgtttcggataagtatggataagttatgtatagtagatattatctgtcacggtgttcccgcacctaacatctggcgtgactatttagcttacattgagcagaagcaaaagatggaagcggttgcagttaactttagagacaagtcaacgtcaggctgggcaagtcatcaagagacttttatttttaaggaaggagtagtaagtactggcacttatgctcgtattttttgccagtctattatgttccggcattcatgtggaatatgtcattttgctaatttacaacgtccttcggatattactataggtgatttttggggatgggagagagtggatcctcactttaatgcggataataagggagtttctttggttttggtcaatacccggaaagggcgtctattttttgatgagacaaaaacgtggatcgactatattgaaacagatacccaacactgtatacagcttaatttgcagtctcctactactattcatccacagagggatgctttcgagcgtgactatgccaatcatggtttcgtttatatcgggagaaagtatggagatatgggctggaaatataaggcgaatttatatctccttgcttttagaaaatggactaaatctatgatagataaatgagaatagggatattaacctttcatcgggctgataatctgggagcagtatggcaagcttatgctttacagaaatatttaatgatatcaggacacgatgttgatattatagattataggtgtacatccatagagacggtctatatgccctttttattacagcgatatcttaaaaaagatgtgtgggctggaatgcgtcaattgatctttgacttgttggttgccaaagatgtaaagtttaaacataagaagtttgaagctttcagaaagcaatatttgaaattatcaaaatcagtttataatacgggtgaaatagaggcgctatcttatgatatgataatcacaggaagcgatcaggtctggaataagtatctgacgggaaatgatttgatgtattttatcccaataagaagcgtcagaaagatttcttatgctgtcagtatggaatataaatcattggatgatatctctgatcatccggagttctatctgtcaactttaagttcgtatgctgcgatatctgttcgggaaaaagctatagctgatagactgggaactataggtattaaaaaagtgaagatgacctgtgatcctaccttattgttgaccaagaaggattatttgcaattgataaaaagagggactcgtttgtcttatggaaaatacattctggtatatcacctggcatattctgacgaattgaataagttggccggatatatctcacagcaaacaggttctgaagttatcaatgtgcatactcagcttagaacgagaagaaaaaagatggaaatacaggattttggtcctattgacttgctttctctgattaataatgcagagtacgtgctaacaacctcttttcatgctgttgctttctcattaatactggaaaaacaattctatgcaataaaaacggcatttagcaatcggattgagaatatactgcgatgtatgaatattgaaaacagacttttggaggatactttccctgacatggctcaaagaatagactatactcaggttgagagctgtagaagtcggtttatcaatgagtctatagatttcattaaaagtaacgtgatatgattaaatgcggtttttatatagagaacgatggtttgaagtctgtggattgtaccgatttgcgtaagggaaatcccggtataggaggggtggaatatgctacgcttcttgtagcagaatggctttcattgactaaagatgatatatctttgactttatatgtgagaagttcgcaaaatctgcctccttctattcatgtaaatgtgtgcagtgatgttatggaagccttggttaagtccgtgaataatggagatgagatttttgtattgaggtttgagccgctttatctgcaaagacacctgttggacaattcttttttgcataaactgaaaatagtattatgggctcataacttttattcaagaaggtatttatcgtatttcgattctctgtcttttgtgaaagccattgttaatgtcggcagagaacagttggatgcgtatagagatcatcatgctttttataaatctacttttatatataatggactatatgtttccgacgaaccagtcagggagtttggtgaacgagcagatgaggtgacctatgtaggcggtttataccctgcaaaaggtgtacactacctgacgcaagcatggcctgaggtgctatcggaatttcctgatgccaaactaaacattattggttccggaaaattatatagtcgggattttaatttgggcacattcggaatagcggaaagctcttttgagaagcagctgcttgaacctcttttggatgaaaatggcgatattattccttctgtcagattttggggagtactgggaccggagaaaaagcagattttgcaaaatacgaaagttggcatacccaatcctggtggcattggagaaacattcggctatactgccgtagaaatgcagttggaaggttgcctggtcacgactataaaaaactgtggttacatggataccgtatatgacaggaatatgttgtatacggatataaaagacttaagtagtaagatcgtttctttgttgaaacataatggaaatgatatgtcacaggtaagagaatacgtaaaatgtaatttctcaatggctgtagtgggtgagaagtggtatgagttattgcaggatgtacatacaggtaagcctatgagacacgaccccgtattagtgaacagaaattttcagttgaagtggctgagagaaataaacaggaagatgaaattgctattcccattcttgccgacagtagctttctatcagtactattgctatcggttaagagaaaagctatgctttcctttttataagacgcggcttcctgttgattatgataagtattgataaataaagactgtttgtgaacctgcaattatcttcatcacctttggtttcggttgtgattcctgtctataacggagaaatgcacatatcagtgtgtatggatagtatcctatgccagagcttttcttcatttgaggctatttttgtagatgacggttctgtggataattcttttcggattcttagtgaaagggcttcatttgaccgacggatgaaagttatccgccaggaaaatatgggagtcacgtgtgcacgtaggaacggggttaaacatgccggagggaaatatatttgttttgttgattgtgatgatagattattgcctgatacactggatattttatataacaaagctctgctgagtgatgccgatattgtatgtggaaatagtagttatgcggatagaataaagttcgaccattttcagactcctctaggctatgcagctgctttacttgaacagaaggttgatctggtagtatgggcaaaactttttagaaaaagtgtactgactgatgatgtatttgatattccttctcacataaagtttgcagaagattatatcatgaatataagaatagctttccatgcggaaaggatctattttatccatgatttgatttatcagtatagcgaatataatgaagactctgttacaagtacatttcagctgactccgatatatgtgcaggaaatttgtggttatgtattggatgaagtgcgtagagctaaagctgaagatacgctacataaatcagttcttcttttcttgaagtacatgatatggatgatgattcatcagaatgttctggatatggacaatgattggattaataagacaatcagagaaatagctccggttctgtcctctcgtgaaagcatctacttaaggatgaggagcagttttgtgtttccgatattgaagaagctcaaagactggtgtaacaggcttttaaacagataaaataaaagatctgatcttttcagatgtttaccctaatgaattaattctttattttatggacactgatattcgtgtgattgcattatatcttcctcagtttcatccgatcccggaaaatgataagtggtgggggaaaggatttactgaatggatgaatgtaggaaaagcacggtctttattccggggacattatcaacccagagtacccgctgatcttggatattatgatttaaggctttctgaagcgagggaggcacaagcggaaatggctaaaagctatggaatagaaggattctgttattggcattattggttcggtaatggaaaacggctattggaaagaccctttcaggaagttctttcatcgggaaagccggattttccattttgccttgcatgggcaaatgaatcatggaagggtttctttcacggtgtaaatggcagagaagtcctgatagaacaggaatatccttcggagcaggatcgtatagatcatttttattcagtattgcctgcttttaaagatgcccgctacatgcaagttgattctaaacctctgtttatgatttataatcctttttctctgccggatgcacggggctttatttctttatggcagaagttggcaaaagaaaatgggttggcaggaatccattttgtcgggcatacctattcggcagaacaagttaatgaggtgatggcattgggatttgatgcagtagaggtagtccggttattcgattgcttaaatcatcgaactttgtctgccagattgataacccggataagaagtgaatatttctatcatcctcgtatcgttccttatagggaagctctgaagagttttatcggtgaggaggagaaagatgaacacgtttatcctacgattatccctaactgggatcatacgccgagaacggggcgtaaaggattggtttttcatcattcaactccggacttatttaaagaacatctcttcaatgtgaaatctgtattgaaggataaggtaaataaaatagtatttataaagtcctggaatgaatgggcggaaggtaattatatggaaccggatttgaagtatggttaccggtatctggaaaaattacaggatgtactggaattatataaagacgataaatgatgcatttaagagactacattcattcggatcgtataaataatttctcctgcttctctaaaagttacctattggactatcttcttcagacagagcaatattggatagggaaatatgtacgtacactccgcaaagaagaattttataccttttacaggaagaataaatttttgcgatattattatttccggaagaaaaatattctgggcaggaaacttggtttctttatcggagcaggttgctttgacgcagggttaaagatttatcattacggttctattattgtaaatccaaagtcccgtattggtaagaattgtacgatacatggtaattgctgtattggcagtaaaggagggattcccgatgattctcctgtgatcggagataatgtcgacatcggccagaacgcacagattttgggagggataacagtggcggatggagtcaggatcggagccggagcaattgttacgaaatccattttaatccctgatgttacagtagtaggaatacccgctaaggtgatagaaaaatgaatcatatcatagttgaagataaattgagggatactaatcctgttccggtagtcatagcttttacgcctaattactttattccggcatctacttgtctgtattctatatttgcgagtctggacatagaagaacaaatgcacgtcatttgtctgcttagtgaagaactgaccgatcggttaaaacaaaagatacaactgatcggaggagaacgtgcacagtattcttttataaatcttcagggcagactacagaatatatatattgatgcaaaatatacggaagcagcttcttatcgtttgctactgccggacttgcttccggaatatgataaagtgatgtatatcgactgtgatataatagtacgtaataatctggtaaaactttatcggtcggttgatttgggaaatcattatttggctgccgtatttgaagcccctatggattttcaactcggacacttgaaagttataggttgccatcccgatgaatatgtaaactccggtttcctgatcatgaatctggaattgatgcgtagagataatatggtagagaagtttatagatgcttcaaaggctgactatctggaatttcccgatcaggatgtgcttaatcagctttgtaagaagcggattctgggtttgccgcctttttataatagtatccggactttttatttgccgcaatacaaacagtatttcctgaagaagtatacagagcaggattgggtggatgttcatcgacacggtacagtgcattataccggtgcaaagccttggaattgtcttactgtagaatttcaattatggtggcaatactatgagctgttgccggaagaaataaaaaaggaatggaaggtgaatagtaaggttcatttcctttccggactttaccggacatctgtaggcgcttttataataaatgcagttcaaacattgtatcgtaaattaaagtataaatgctaaggaagatagaattaaagaaagcagtgaaaggtcttattccaatgaaactctggaatgcaaggcgtacagcatctattataaagcaacacaagaacgtagctgccttctggactcctgtcattgaggcttactataatggggaaatagaaagctactcattaaagccaaagaaagagttagatactcagaaggtcatttggcaatattgggggcagggtatggataacgtcagtttgcccggaattgtacagatttgctttgattcggtagatagaaacaagggagcttatcgggtgattcgcttgacggacaagacggtatccgaatatatagatttacccgattttgtttggagaaagcgtgaaaatgcacaatttacccgaacactgttttctgatctgcttcgtatcgctttattgagtgtttatggcggtgtgtggctggatgctactattctattaacaggaccgcttccggatacatacggaaaatatgatttcttcatgtttcagcgttccgacgaagaaaagaacaagagatactggaaaggggtctatgcttattattttgggtggaggactgattttaaagtaaaagtcctgaatagtatcatctttggccggaaagacagtgtggttatttcatccttaaaagatttgttgctctacttttgggaaacccaggattcggttcccgactatttcttttttcagatattgtttaatgaactggttaccaaacgcctgtcggataggaattgtccggtaattaatgattgtattccacatattatccagacgaagattaatggaaaatatgatgatatctcattcgatgaaacattgaaattgactaacatacataaaatggcttatttcgacgatgccggaataatgcgtttaaaaatgatactaaagcagcatggaaaagtctgaaatgaaacatgcttatttgataatggctcatcacgagtttgaagttttagggaaattggttcaggctattgatgataaacggaacgatatatttattcatttcgacgcaaaactcaaaagctatcctgtgctgaaggcacataatgcaaacttatatattctggaaaagcgaatagatatccattggggacatatttcacagattaaagcggaatatgccctgtttgagacggccttcacacaggatagatacgcttattatcatctgctttccggagtacatttgccattgaaatctcaggataacatccattgtttctttgataacttaaaagataaagaagtactggcacatgtacctaattccgactatcaaaccacccttaaaatgcggcgatataatttattcatgaagcatttcatgcacaggaattcgtttataagaagaatcagccagatattatggaggatttgtatccgcattcagaaggaattgcatatctatcgaaatagaaagcagttttatacgaatgcagcgaattgggtaagtataaccgacagatgcgtctcctatctgttgcaaatcaaagacgatgtgctaagaaagtatcgtttcacattatgcggagacgagttctttatcccttctgaactggaactctcagaccttaaatatcggatttattatgatgaccgattattgaaatgtgattttggaggaggctccaatccacgtatatatcgtttggaggattatgacgaactgatgagttccgattgtttgtttgcccgtaagttcagccatgtaggtatggaccttgtagacaaaatattgacctttaatactacggataaggcacaatgaagcacgcctacttaatacttgtccataacgattttgagattctcgggcaattgatccgggcaattgacgatgaacgaaatgatatttatattcattttgaccggaaagtagctcactgtccggattgccggacattacatgccggacttatggttctgactgaacgtattgacgtccgttggggagatgtaagtgtagtaagagcggagtatgcgttgtttgatgcggcatatcgtcatgggggatatcgttattatcatttattgtcgggagttgatatgccccttaagtcacaagattatatccatcgtttttttgaggacaatgatggaaaggagtttataggatattatcaaggggatattacaacagaaatcaaccggaaagtccggagatggcatctgttcccggaaagttttaagaagacaggcagcatgacggctgttggaaagcaagtgctgcgggctggttttatccggttgcaacaaatgaccggatttcaccggaataagacaatagatttccggaagggcactcaatgggtgagccttactgcggattgtatcggctatttacttcaatataaggatgaagttgaacgcatatgcagtcatacattttgtgcggatgaaatctttgtgcagacactatgctggaattcctcttttcgagagcatatatatgatacagaagatgaaggacatggatgtttgcgaatgatcggatggaaagataaccggataaaagagtggaccgaaaaggattttgagactttgatgggatcggaagcattgtttgcccggaaatttactagccgtcatatcggggtagtggggcagattctaaatgagattacaagatgaaaggcgaactggagaaaagacaatcggaagtaattgccgctatgaggttccctctaatggtgttattgctttttgcccatgtgctgccgatggtatcggtgcctatagagatgaatttgtcggagatgaatatatatcattttatttcggaggggatatcccataatctgtccagaatacgtaatcccttattctttttcttttcaggctttttcttctttcgtaaactggaggagtggaatgccggcttttaccgctcccaattaaaaaagagaataaggagtcttttattgccttaccttttatggaatatactgatgatagcggcgatatatataaagaactatgccgtcacttcttttctctcgatggaaccgggtgaggagctatcgagtctacgggttactccctggtatattctgttctggcacactccagccaactatcccatgtggtttttacgcgatttactttgtatgtccgtattggcccccctgttctatctgtttttcaggtttctgaaaggatacggtgtactgatactggtgattctgtatttgtccgcctgggaaacggatgttgcgggactgagtatgtcagctatcatgttctttggggcaggtgcctatatggggatttacaaaaagaacattctggagttttgttccaggtttcgttatacggcggcgatagccactcttttgtttttgtgttgtgccacgatgtgtaatggaagggaattgcatgtatacatcgttagaatgtatgtactgtttggaatagtgaccgcttttaatctgatggactggctgataaaccgggagacatggaagaaactcttttgcaatctgtcggctacagtcttctttatctatgcggcccatgaaatatacattataaactggacgaagggtttcttttcccgtacttcccttgccggttccggaggaggattattgcttagctatatgctgatccctttcatcactctgggcatttgtctgggactttattatatattgaacaagatggctcctaaagcgcttgccttattggttggcggtcgggtaaagagccagataacggaaagcggcagatgaatattgaaaacgtgacaatctcggtgattatacctgtatacaatgctgcaactaccctgcatcattgcctggaatccttggacagacaaacttacaggaaactggaacttctgtttatagacgatggcagcacggacgacagcctgaagatgctgacttgctatgcagcacggaatactgatcctgtcagagtgatcagggtgttgcatcacgaacggaaccgaggagtagcggcagcacgcaacacggcactggcacatgctacaggcgattatatctattatgtcgatgcggatgattccatcgaacagcatacattggcgtgcctggtgagagaagcaaagaaaggcggacaggatattgtggggcatgaatggtatctgactttcagctccagtgaacggtacatggagcaggctgattatacaactcctgcggaggccttgcaaaacatgatgtgtggagtgatgcgctggaacctgtggctctttctggtgaagcgttcgctttatgtggagaacgatatccggtttgcagaaggtatgaacatgggagaagatatgatggtgatgatgaaactgtttatttgtgcagagagtgtctctatcatacatcggcctttttatcactatggacagaataatgtgaattcgttgacaaaggtctattcaccggagcatatcaggcaagtgactaataatgtatatgaggtagaacgctatgtccgcgaatcggcttatgccggtttactatccccttaccttcctttgctgaaattgaatatcaaacttccgcttcttatgacagatgatacggcgcgttatcgtcagtggttggaatggtttccggaagcgaatggttatgtgatgcataataaacagatttctttaagaacacggttcatccagtggctggccgtgaaacaaaactttagcctgttaaaactttatcacaggtgtgttttcagattgatttatggaacgatttataaatagggcagtaagactatgatgcgtttattggcaatgttgttggtggcaatgatcgtgagtggatattatttcccatttaccttttcctttctgccgggagtgaatacgaagatggtgttggcggtcatcggcatcggcttggttctttatgaaggatgccggaagcgtgggattacattctcgaaagagttgatgggtgcagtcgtactggcctgcttcttctctttcgtatgcctgttttcaattgattacaatcgtacggatgattattcttacgtgacttattttgccactttcttcacctggctgggcggagcgtatgccacctgtacggctattcgtctgattcatggaaaagtcactttgaaactgttggtcagttacctggcttttgtctgtgcaacgcaatgtatactggccattatgatagacagaatccctgctttccggatgctggtggattcttatatcgatcagggacaggaattttatcaggaggtcggcagattatacggtattggtgcggcactggaccctgccggagtacgattttctgtagtgttgatattgatcgcttaccttttgtgtgaagatgatgtaatccggcaggaccggaagaagataacaggattcctggtctgcttttttatcatctcgattctgggaaatatgatttctcggactaccactatcgggatgatgatggggctggcgtatatcatttattcaaccggaatattccggttgacgatatcggtacgtaattttaagttctattccgttttcgggtttctgttggttgtgtccgttatctggggaatttatatgtatcagaataactacaccttttatcagaatatgcggtttgcttttgagggtttctttaactggatagagatgggtgaatggcggacaggttctaccgatagactgaatgctatcatgtgggtctggccggaaacctttgaaagctggattattgggacagggaagttcggcttttacactttcagcacggatattgggtactgtcgttttatactctattgcggtttggtaggtttcggggtctttgcatcgttctttatattcaatgcatgggtctttgcccggaaaagagagtcctttctccttttatccgttctgctgctgtctctggcttttatcatctggataaaggtagctactgatattttctttatatatgctttgttctattgtctggactggaaagaagccgatgctgaagtacttaaagaatcgtttgcagcgaatcataacagtcagttcgaaagatgagaatcgtttattgcatagcgggaacctataattccggaggaatggaacgggtattggcaaataaagccaactatctggtcagtcatggatatgaagtcttcattatcactaccgatcaacgcggaaagcaacccttcttcagtttggatgaacgcatacgctgttatgacctgggcattaattatgaagagaataacggaaaatccctgttgaataagatcatccactatccgttcaagcagtggaaacaccggaaacgcttgtcggaactgctcagggaattaagagccgatatagcgatttccatgttctgcaatgatgtctccttcctatggaagataaaggatggaagccggaaaatacttgaaattcatttttcccgctataagcgcctgcaatatggacgcaaaggggcctggaagctggcagaccagtggagaagtcggatggatgaaaagacagtgaagaaatatgcctgctttgttgtattgactcatgaagataaatcctattggggagatttaccgaatatcatggttattccgaatgcgttaacctattctgtcggtcaaccggccccgctaaataataaaaaggtgatagcaatcggcaggtataattaccagaaaggttttgactatctgattgatgcatgggcggttattcatcgttcccagccggaatggaaactggatatcatcggagacggagaatggctgaaccgtttgcaacggcagattgaccaacataaactcaatcattgcatacgtttgaaatctgctactagccatatagaagatgaatacagacaggcatccttattggtgatgtcttcccgctacgaagggttgcctatggttctgttggaagcccagtcattcggactgccgattgtttccttcgcatgcaagtgtggtcctaaagatgtaatcactgaaggagaagatggctttttagtacccaaaggaagtatctccgtgctggcagacaggatactgaaactgatggaaaacgaagatttgcgtaaacgtatgggcgaaactgctttaaagagctcataccgctttatggagtcggcaattatgcagagatgggaaaagttatttgactctttgggtatttgattagagaggatataagccatcataataagataaatctgcttataaaaatgaaaaacatctgccatctgcaacacatctgaatatagtttttgggcatcttaatgataagaacaagttgcatactgatagcttgcttatagctcaaaaaagtttcaatgcatgaaaccttttgtttcaccacatgaaactattgttggaactacatgctctgcttctttgctataggtggtagtcagtattgctccatagatgagttcgagagttataagtaaacgtatatgaagaaaatagtaatatcggctgtgaatctgaaagtcgggggtactctggccattttgcgtgattgcctgcggcatttatccggtctggcggcgacaggcgaatatcaggtcatcgctttggtgtatgaccggaaagtagccgattatccccacatagagtatatagaactgaaatggccgaagaagaactggttcaacaggctttggtgtgagtatgtcgccatgcgtaaaatctctgtccggcttgctcctgtgtacctgtggctgtccttgcacgacacgacgcccaatgtaaaggcacaaagaagagccgtttattgccacaattcatttcccttttatcgctggaaaatgaaagaaatcctgtttgctccgaggatagtgctgttttcactattctccaaatacgcgtatcggattaatattcacaggaatagttatatcattgtgcagcaacaatggtttcgggaggctttcgcccactggtttcaactgtcggcggagtccattatcgtagccccgcctgtgctgcaacggcaaccaccaacgaagaagaagctggatgtgtccagtgtggagatgaataaggatgaatattccttcctttatgcggcaacctcggacagccataagaattttgaatgtatttgcagggccgcagtgcttttgcagcagaagatgccggaactgaaatttaaagtttacatcaccgtgaaaggcgatgaaaacgcttatacacgatggctttactcacattggggcgatgttccggctctggcattcatcggatatctgagtaaagaacaactttacgcatattatcaacaaagcaactgcttgatttttgcttcgaaagtggaaacatggggattgccgataacggaatttgcggttttcaataaaccgatgcttctgtccgatcttccgtatgcgcacgaaactgccgccggctgtgagcaggtggccttcttccatccggatcggccgtggaaactggccgctcagatggcaaaactacttcagggagaaaactcttttctgactgcactgcggaaagaagaaacttctcctcctgttgctgaatcatggaaaaaactatttcatattttattaagatgagagtactacaaataggcaaattctatcccattagcggaggagtggaaaaagtgatgtacgacattactatggggctgtcacagaaacaggtctactgtgatatgctgtgcgcttcggcagagaagcaagaccaggggaatcttttattgaatgactatgcacgtgtgctgtgtgtgcctacctggaagaaggtggctgctactatgctgtctccggctatgatcttccggttgcgcaagatacggaaggaatatgacatcattcacatccatcatcctgatccgatggcgtgtctggcattgttcctgtccggttacaaaggtcccgtcgttttgcactggcatagcgacatactgaaacagaagatgctgttacggctatatacaccgctgcaaaattggttactccgaagggcgaaagtgatagtcggcactacccccgtgtatgtgaaagaatcaccctttctggagaatatacagcgcaaggttaccagcattcctatcgggatagacgaaatgaaaccgattcccgaacgggtagcgcaaatcaaggaaagatatgccggaaagaagattatcttttctttgggacgcctcgtggaatacaaaggttatgagtatctgatacaggccgcccgtcggctgacagatgattatgtcatattgataggtggcagaggtcctcttcaggaatacttgcaggcattgattgacgagctgggggtagctgaccgagtcaaattactgggctttatcgaagacgatgatctgccggattatttcggtgcctgtgacctgttctgtttaagttctatcctcaaaacggaagctttcggaattgtacagatcgaagcgatgtcctgtggaaagccggtgattgccatgaacataccggaatcgggagtcagctgggtaaatataagcagcttctccggaatcaacgtaaaaccggaggatgcggaggcactggcggaagcgatattaaccgttctgactgataaacatctgtatgataaactgtcaaaaggtgcccgcaggcgttacgaaaccatgttcaccaaagaactgatgacagaactttgcctgaacctttaccggaaagtattgagaagccatgctgaccgatagccggataacagagaataaataatttccaagaaatataaaacatgagaaaaagagactatttgatgaaaaacatgtatgtagtgttagtgttggcgatgctgttgacgacttcttgtatcaatacaaaaagaatcgtctatctggaggatatgagagaagacatctcttatccgatgaacgcacagccggagatgagaatccagcgcgacgatcgtctgagtattattgtcaattcgcgaaacccggaattaacggtacctttcaatatatctaccggaggcgattttcaggtgacgtccaacggagatgtatccactaccgccggtagccagaagcaggaaaaggggtatatggtagacctcaacggatatatcgaattcccgattctgggcaagttgaaagtggtcgacctgacccgcaagcaggtggccgaccttatcaagaaccgcctgatcagtgagaatctgattaatgaccctttaatatttgtagacatattgaatatcaagataaccgtaatgggagaagtcaaaagcccgcaggtgttgcaggtggaggatagccggattactttgctcgaagccattaccagaaccggtggcgtgacgactaatgcccttttggacagggtggcagtcatccgtgaagaaggaaacgagcgcaaaatgtatatgcacgacatccgttcgtcggatatcttttattccccctgctattatttgcagcagaatgatatggtgtatatacatcctaaattcgcggaagcaaatacaaaagaacggcgtacattgggcttttactcctttggagtgactcttttaagcctgattaccacactgaccgtattattaaaataactaacgattgcacaaagtatggaaaaacataaaaagctggctgtaacggaggaggagaagtccatcaatattgtcgatctgtttgtatatctggtcgttcactggaaatggtatcttctgtccattttgctgtttggaggatgtttctggtatatttactgtaagacaccatttacgtacagccgggtagccatcgtgatgattaagacgccggccaattcgcggtcgactatgcagttgaataattccgattttacggggttagtcaatgtagcgagtgagattctgcaattcaagtcgaaggagctgatgcggaaagtgatcgaccgcttgcaggcaaatatcagttatacggtgtacgacggtctgcggcctgtagaactttatacggaatctcccgtgcgtgtaacctttcttgatgcgggaatggatgaggcgcactctttatccgtcactcctaaaagcaggcagcaagtagaactagctgatttctcgcgcgggatggaacaacggaaagtagtgaatctgaacgacaccattcatacggcattgggaaggctgattgtatttgccgcagaaaactacggggaatccagcttcggtaagcctgtcttagtgacctgtaaaccaccggaagaaatggtatccttttggctttacaacctggcaatcaaacaaatgagtggcgatgccgcccttttgcatctgacgatgaatgatctttctccgacacgtgccgccgatattcttgacatgctgattaccatatataacgaagaagctataaaggataagaaccggattgctgtgaatacggcggagtttatcaaagagcgcctgcaaatcatcgaacatgaactgggcagcgtggagacagatatcgaagacctgaaacgagcgaataatggagtcgatatcgacatggctgcgggcatgtatatacaagacagccgggagtatgaatcatcaatcaaagaactggacacacagttgcaactggtcacattcatcaaacaatatttgcaggattcaagcaaggaggatgaactgattcccagtaatatcggactggaggaccttaatattgagacccagatttcacgttacaacgaaaccttgctgaggcgtaaccgcctgatgaacggcagtagtagcaacaatcccgtagtacaggaactgaatcgtaccatgcagacaatgaaactgaatatctacagggcattggataatctgtctgccagcctgaggcttaaaaagcaggactatagtcttcaggaaaaccgggtgcgccagaaagtgcaggcggttcctcgcaaacaacgggaaatgttgtctatcgagagacagcagaaagtcaaggaatccctatatatattcctgttgaacaagcgcgaagaaaacgctttgagccaggcaatggtagataacaatgcgcgggttcttgatccggtttcgggaagcaacattccgatttctcccaacaaatataaaaagcttctgttaggagtgggttgcggagttattgtcccttctgttattctactgctgatgttgatgctcgacaccggagtgcacaaccggaaagaaattgaatccattgtcaacgctcctttcctggcagatattccgcaaacacctaaggcgatggctaatgtacatgaggtggtggtacgtgcccgcgggctggatgcgttatccgaatcgtttcgcattctgcgcaccaacttaggatttatgttatcccagacgcaggaacgcaaagtgataacgcttacttctttcaacatcggagccggaaagacattcatttctatcaatttggcagccagcctggtgcagaccgaaaagaaaattgtattactcgacctcgaccttcgaaaaggtaaactgagcgaaatggctcattgccggcaggtaaaaggagtggcgcactacctgtccgattcatctgtggaggtaactgatattattgtgcaggatgcttttggcgaagggctcgatctggtccctatcggtgtgattgcccctaatccgacggaacttttactgagtaagcggttggataaactggtggtcgaactgaaggagcgatatgactatatcattgtcgacaatgtaccgataggcttggtggcagatgctacggttgtgaatcgcattaccgatctgactttgtttatcgtgcgtgtcggtaaaatagaccgccgccagctgcccgaactggaacgcttatatcaggaacataagctgaacaatatggctgtcgttcttaacggaacggaaaaaggcagcagcggctatggctatggatacggctataactatggttatggttatgctgcaactcagaaaaagaaaggaggatggtggagacgtaagggaaagaaataatacgctgtctcactttgacagagtgccctgcgaatcgtataatgcttgctatgggggacttttaataggcttctgtataaagtgagaaagttatcggattttatgtgagtaataaaacggaaaaaaagcctcaactttgcagttggaacttggtatattgaattttaatgaaaagaatcacttatgaaaaaagtaattgttctatcggctttgctgctggtaacaggaatgagtgtttatgcacaagaggacttctctaaatctataaaaacgacaaccacaatcgtagaaaatgctgataaatataaagtagaaaccaatcgcttctggagcaactggtttgtaactgccggtggcggtgccttgatctttttcggtgaccataatatgcagatgaaatttggtgaccgtctgagtccagcattggatatcggttttggaaagtggtttacacccggcatcggtgtacgctttatgtatagcggacttactatcaaaggtgctacacagaacggtagtcactctaccggaaaagtgtacgatgcttcacaatggttggacgaacagaaattcgactttatgaatattcatggagacgtactgttcaatgcatcgaatctgctttgtggttataatgaaaagcgtttttggtctgtaactccctatgttggtttaggctggatactcacgtgggaaaccccgcgtgcgcgtaactttaatgccagtataggtttgatcaactcgttccgtctgagctctgcgttcgacttgaatatggatgtgcgtggtactgcaacaaaagatgaatttgacggtgagcgtggtgggcgtaaagaagaaggattattgtctgtaacagtaggagttacttataaattcccacgacgtacatgggggcgcagcaccgtaaagacaattacctttagtgatgaagaactacgcctgatgcgcgaacagttgaaagcgatgaatgacgagaacaatcgtctgaaaaacgagttggtagaaacctccaataaagtcacggaaagagtggtggaaacgaatatcctctctgctccttatctggtcactttccagatatcaagatatgctcttagtaatgaagctcgtgtaaatatcggatttcaggctaagataatgaaggaaaacaagaatgctgtctatacaattatcggttatgccgataagggtacagggaccaaggagtttaaccagtttttgagcaaatctcgtgcagaagcagtctacaactgtctggttaatgagttcggagtaccggcatcgcaactgaaaataacttatgaaggtggtgtggacaatatgttctatgatgacccgagagtaagccgtgcagtgataacggtcattaagtaaaccgaaagtatggatgagatgaaataaaaaagagcacacatataaaacattttgtaattagttaaaggatgcctgagcatctataaatctcatggggcataactctgtaatggagtgcctcgaaaatagtcatctgtgaagatggtcgctattgcttaatctgaaagcatctttttccagtgggggagaggtgctttctcgtgatttgattcattgaatttgttacttgtgagaaataaagaactaaatgctatttagtaaagtaatttaattgctatgcctcttttcatacagaaatacttgtattgaactagtaattcctcctaagtatgtgccatatatgtagtggtctgagttttttttacatgagctcatgttataaaggtgtatttcatagtattgagatggattattgggaagccatatttgtgtttgatcgggaacaatagcgcctccttcaatatattcttttggctttccggaatttgtagtataaatgctataagtatttactggcatgtattcttttgtattatgtatattaagggaaggactagtacattttaccatagatggtccattagcagcagatctaatttcgtaacttaaatatttcttaccgcagtcttcggttgatgtacttgatttccctttatcatctattacaattaatgatccgctacgtcgacatcctgtacatttagaatcgctattgcaggaaatagaataagttgcagtataattagttttgtgatgactgaaatgttgactaccagaaggtccacagagaagggttaaatcttgtccaatccctttgatggttattgttacagtatgactgtctgcattgccagtccatgaaagagttgtcccaggatttgatgaatatttgtcattatgataaaggtttacaacagggagacactccccatagccagaacaatatgttgttgaagaaaattgctcattattttgtgctaaagaagcactgcttttaggatttgaggctagaccttcatacgtagtctcatcattgcaggctatcacgaatagagtgagtataaaaaatatatttgtaacttgtgtttttctcattttttctacattttacttgtgttttttaaaaatatgcatttcattccataataaatgtgttttctatatataattgagtttatttaactatttgataattgggaccggatgttgtattttacttttacatcaattgggttccttatcatatacagggttttgatggttgattttctttctatcttaattacaaccatcttaaaccgattgtgctggaaggggatatgtaccgactggtatctccttagcggaaaccatacttccacccaatatgtggggaaagataagaagggagctgttgtctttgcattcgatatttacccccgttatggcgagaaactgttgcctgtccgtctgcaaggactggatgccggtcggcagtaccgggtgaaggaaatcaatctgatgccgggcgctaattcttctctgcaaggaaacggtgagttattctcaggtgaatatctgatgacggtaggactgaatatatttacaggccagcgtctgaatagcagagttatagaagtagttgctgaatgacaggccgacggaaatccgttaaacacttgacaaacgctttttattgttgtatatttgtagttccaaacctgaactgaataatataagaacgatataataaaatgagaaaattagtgtgtgatcatcctctacggtggtataatatagtacaaatagtacttatctctctgacgtataacagaggataggatactccgatataggaaaaggctgcgaactttatgagttttgcagccttttttgtattataaattcaatccagattctacaaattcctattttaaagtttataataaacgagggggacgtttataataaacggtcacagtatttattataaacccggttgccgtttatgcagtactctgttgctatttttgtatagttagaatgtgcgttctccgattatagttaattacgataattatagttgacaagggttgcgggtaatctaaccatacaaagctcttgaataccttacgttacttatgcgtgaagttccagtataaaccggcatcccttggtgtagcttgtgtccaatgtcagactgccattcattttggtggcgatgagtgagcagataggtaatcccaagccatcacctgtagtcaggtctttgacctgggtgaaaggtttgaagagattttcctgttgttctgccgggatacctgttcccgtatcggttatgatgaactgatgggtgtgcgcgccacgtttcttgaagtcgaggctgatacgtccttgctccgtatagaaagcggcatttttcagcaagtagagcaggatacgttccagctgttctttattcgtttttacttggagtttgggggcgtttacagaaggggtgacgtccggcttcataaattctttagccttctccatgacgctttcgcagaaagtacccgcattgacttctcccatttcataaggttcggtcagtgagttctccaaagaggaaagctcttgaatattgtcgctgaattgctttaaggctgctacttgtgcctgcatctgctctgcataccttggtgcttgggcggaaagctctttggcggaagtccctaaagtgttcagagtcggctccatttgtgaggatatattccggatgaactttgttttcagctcgttgtgctcattggctatgaccacgctctttttgagtttgcggttgccggtgataaatttcagcagtaagatggcaagtacaatgattgtggctacaaggatagctacaagcgtacaaagtcctatgatgatgtattgcttggcggatagtgtgctgtctttgtcctgtatggtctggaggctttcgtcatattttcgtttcaggacattcagctcatcctgggcagtcagggcttttacagagtcggtccatacaatatagctttcgtacgtacgttccatcaacggggcattgttggctttgcgggcgatgccgataagagtcttgtagcagtcgctcactttatcgtagtccttcttttccttgtattggctgatgagtttgcggaaacaggcgtctccttgtgtattctgattgaaagtatagtaatagttggctttcgtatagagcagcacttccattaaagaatcatttttggcgagactggcaatctcttccaatttgtccagctggttttttgcctgtgcaggattcttcagtgaaatgtacatctgcaaccgttccttgctgatgggaaagcgtaagtcataaaagactttgttttgcttctgttcgcctgtccaaatgagttgttccatattacggcataattcgaaaccttctttgtagaagttttctctgacatatagagcattggcttgaataccacattctatagcttgtggatagttctctcgcacggcaaatgcttcatacgctttcttaaacagataacgggctttgatgtaatctttctgcttcaggctgcttaaagcctgttcttttagttctgtggctttatcctgaggtgcttgtgcataaactgacagataaaaacaaaatgtgattaaaagagttacaatggacgttttcatactattgcttttattatttactacaaatgtaaaacaaatatatgaataaaaaagatatagccagtaaaaaaaatatcgctgtttatacgaagctaagcgggaacaatatgtagaatacttaaaaaatcatttgtcgaatgtataaatagttctgtggcgatactcttcccccggcatgagcaggcaggacggaaaatgcggatgcgaaggggtatccggaaagtattgtgtctccagacatacaccgatatccggtgtgggagcgagatagccggcggtatataataagacaccgggtaagtcagtcctgacagtcagccttctgccggagaaagggtcggataatacggcggctgtcaataacgtgtcggacgactcttctttcaggatatagcaatgattgtatcccttgttccagtgcaactgctcgttatcgtcgtaaagatgtgctccgatgctgcgactggtgctgaaatcaaacggactgtctttgacatcctgtgcctgtccggtaggaataaattgtgaggttgtctctaatattcgtgcagcaggtatcatgagctcatgctccgttatttttcgtttgttgccggacaggttgaagtaagcatgattggtgagattcagataagtagggcggtctgtggttccgtgatagctgattgtcagttcgttggtttccgtgaattgatattccacttccgcctgtacatttcccggatatcctccttccatgtccggagagtggagaaggaaacggatgccggaatctgtccgtttccattgccatatcttcttgtgaaagccggatagtccgccgtgattggtgttctctccgtcgtttttctccagcagataggtagtgccttcgatagaaaaggatgcctgatgaatgcggttggcaaaccggccgacagtggctcccatataataggtgtctttgagatatccttctgcatggtcatatcccagcagaatgttttcaaagacgtcgtatcggttcggcatattggccgaaacccaggtggctcccaggtttgtaagctcgatggaggctccggtagcgttggtcaaccggaacagatagatggaatctcccgatggagtacatccccaatgtgtaattgtaaactgcatgatctgcttattttatatgaatcttttgctttgcaaaggaaagcaaaatcaaagaatcagaaaatagagaaaatcagtttaaagatggacaattataagaattgtgtctgtgtttttctatcgaaaggaaatggggatgtgctctctcaacggaatgccggaaggtgtgttaaaaatcggtagtatcttaaatctcctccttcgggaaggaggagtacccgcagggggaggtggtaggtgaatacgcaattctttcattcatagtaaattatagacaaccccattttagttactattgacttttgaaacacgctctggctttctgatagttatttcttcattttagcgagtagaatgacgttgttgccttcttcatccagtgaatttatcaatgtttgtgcacgtttctttgcctctgccggaatatctttccgggttatttctttttccagtgtttcttttagctgggcaggttccatgttggcaacataataaccattgccgaatgaaggccatatctgcatctttttcgttcccaggaaatcattgtacaggcggaagtagctgccatgcagtgttttcttatctatgatatacttggcaggcttgctgccgctccaagtgttttctgatacttgtatcggcacggaaacgtctccgataaagtgacgcgggtattcggaatagccatgccaggggattttctccttgttcggatattccacggtgaatctggcttcgagtcgattttgggctgcgttatagtggtacagactgtccgttcgtggggcaggcatgatcaccattaacataacgccgtaatcattagtattattatccataaatacttcgttgctaaagtcgcgcggaacggtcagatgtcccggtgcgataaagttcttgcgtttacctttgaaatcttgtgtccacacgacagccggccagccttcgaaaggcagagttgtcagagtgacttccgacttttccgtatctactctgaatttgcctttgggcacgcgcatacataaaggaatgggaggctgaggattgccttgtaaatcgaatacgagcagcttgtcactctgccagggcagtatgtagatacggttgtgggcttcgtccaactggtcggcgtatgtgtttccatattcgttgggcccttgtccgtaggcaccgatagtggtgatgaatttgccgtcgcgggtaaaaagtttgtagggagtctgtttgttattgctcaccaggatgtatttttctcccactgtggtgcgtatccagcctcctactagtgcttcgtcccggttgtctagtttgacaacttgaagttcttctgtcaaatagctgagtggaatgtctactgtgtctttcaaagcctttaaattacatgagactagtgtgccggtaggtgtcgtgactcgttttgctacaataggggagagtgccagtgggtcggtctttgtttcactgttgtatacaaaagcaacaattgcaagtagacaactagcacataaacttaaaataataattctgttcttcatacggttctgtatttggttagtactgtttttctgattatcactgaggcaaaagtagaccgaagtgagcagaaaaacaaaaaaacaggcggacaaaaaggtacgatgtgactagatgtatgttgttgattattaataatataatatatatatgcgtttgttttcaggcggacaaagacttcaactaccctggggcgacagctaaaaaactttgagaaaactgtctaaacttatattctcatcagtaattcccagcttatcagtctttatccgatatttccgtttggtaatggcagctttgctcacacaatagatatcagataaatcctgtatgttgacattgattttgacgaggcagcagaagccgatttctttatctcccaactgcggataagcctgtcgtaaccgaacgacaaaattgtcgaacgcatcattcactactgaagtgacttctgcccattctgcatctgtcactactatcttgtgactggtgcccggttcgtcctgattgttgttggcatggagtgagggcaacttatggaagaatggcattctccggaaaagcgcttcacggagttcagtctctttattccttagccggatttctttctcccgtagtccacttacttcggcttctttgtacagtaactggttttcccgcagcagtcgcttctttttctctctctgataaaagaaaaatgcgatgaatccgatactcagcagagctgtaacgattcccagcatccatagttccctttgctgctgttgcagatgcagctggtataattcattctgtaatttgagttggttgaattctctttcccgtatccctgtactgatattgtttagtatattgtcccttatcgtgctttccttctgcttggtataaaagacttgttccggatattctttttcattgatcagattgaataagcgtgcattggcttccatggcaataaagctggaagatgagattgcggcttgccgatagtaatattgggcggagtcaatctgattcaaggcggcatgggttcttccgcatagcagcagatagtgtggtacttcatttcttccgcggcgttggctcgataattgttgaagatatatgactgcttgccggaaatcctttctttgcagactggtgttcaacagactttccagcgcataataattcaaagactggtatttgggcgaatccataagttctttcattagctgcagatagctttgggtgtatctgtcatgatcttgcattttgtttataatttgcagatatagctggctggtagaaaaatagaaaagtgtatctttcatcttaagagccagttgtctgctgctgtctgccatcaccaatgcctgcggataatcctgctttctgctgtatgctgcccttcgtagcccgtacagccttgtttttagcgtatcatttagctggtatcctttcagaatttgttcgctcatcagtaatgtggaatcgggcagattacgatataaataggaggcgctttgctcaatgcgtgcccgtacatactgggtttgctgctcgttttgtttatattgccggatggcgatctgcaataatgaatcatcaggtgttcctgttttccacagagttgccttgtagagcaacaggtaataatctccctgatcattgagaggtaatttgtcgggttcttctatttgttgcaggtagaaaaagatactgtcggttgatacattctccatctgcatcgctttttccagaagatgagatggggcaggttgacaactactcagcatgataagccatccgatgagtagaaatagggggtaatatgggttgtcgtgtttattcatatactagattctatcttgcgaaaatagtattttatatgagacaaagactttttctttatggtattttattgatttactgtcaagcgcttttatcccgcccagttttctctgtctagattgcgataactgatggcttcagccaaatgggagggctgtatcagttccgcaccctcaaggtcggcaacggtacgtgccacctttaatatacggtcgtatgcgcgtgcggaaagattgaggcgttccattgcatttcgcagcagggaaagtcctttgtcatccggccgagcgtaaatggataataacttgctgctcatctgtgcattgcagtagataccgggatgatcggcatagcgctgttcctgtatacggcgtgcctgaatgactctgttccgaataacactgcttgcttctccctgtcgctgatcggatatcttgtcgaacggaacaggaacaatctctatctgaatatcaatacggtccaacaacggaccggatatcttgttcagatacttttgtacctgaccaggactgcatacacatgccttggtcggatgattatagtatccgcaagggcatggattcatggatgcaatgagcatcagattggcgggataactgattgtgctctttatgcgggagatggtaatctgccggtcttccagtggctggcgcaggacttctaatacccctctgttgaattcgggtaattcgtccaaaaataaaactccgttatgcgccaggcttatttctcccggttggggaaaatttccgcctcccaccattgcaacttgcgatatcgtatgatggggatcacggaatggccgttgggaaatcagtgaagagccccggtttagttttcctgcaacggaatgtattttggtcgtttccaggctttcacccagggagaggggaggaaggatggaaggtaaccgtttagccatcattgatttaccactgccgggagcgccgatcatgatgagattatgtcctccggcggcagcaacttccaacgcccttttcacattctcctgtccttttacgtctgcaaagtccaggtcaaaggctgtttgctgttgataaaactcttcccgcgtgttgacaacggtctgttccagctcccgctcaccattgaagaactggataacttctttgatattactgacgccatataccttcagttgattgacaactgctgcttcccgcgcattctgttgaggaataatgagtccctcaaagttttcttcacgggctttgatagcaataggcagtgctcctttgataggctgaatgctcccgtcaagactaagttctcccatcatcagatagcgggataacttttcggaagatatggtttcgctggcacccagcaagccgatggcaagaggcaaatcataagccgagccttctttgcggatatcggccggtgccatatttacaaccaggttactggtcggcattttatagccattgacttgcagtgcggagataatacgttggtgactttccttcactgcggaatccggaagaccgacgagatagaacatacagccacgtgagctgttgacttcgattgtgatgagtgttgcatcaatcccttgaacagccgctccgaaaactttaattagcacgtttgattaccgtttatttcttctgtttgtttttcttttctttttctgtcgcttcctcaacgatgttttctattttctttttcagctcttctccccgaaggttcttagctaaaatctttccgtccgacgagagaagtatgttggcaggtattttatagatagaatattgcttggctacttcagaattgagtccgccgaaatcgcatacctgttcccagtccagcgtatcgcgtttgatggcgtctttccattgctgcttgtctacatccagtgagatgccgagcattcctatatatttgttcttcttatactttttgtagatttctcttagctcgctgttgctctgcttctgagagatgctgtcgttccaggaagcccaaaagttgatcagcaggcttttctgcttgaaggcgtctgatgaacgggtaatcttttctcctttcgcattgggcaggctgaagaaaggtgcatatttgccaatctccgatttttctgcctgagtgattgtttcattcaaacgttcgatatacggtttgtcctgtaatacacctgtcattacttcaactagctttttaattttactgaagtcaggcgtttctttctgaacgaagtatttgtctaataagtaaaggcttacataggaggagtgatgttgcagtatgaactcttccgccatttcttcggcagtgtttgctttctctacagttattcttttatccactgtttcttcgccggctttttctgaaggatcagccggatcttccagtgctttttggaagtctgtaaactcctcattgtatatatttccactgatagtcaggaaattcagattgatcgtatctccttttattttgatcttgttacccttatcaagaaagacaggatattcaatccggttcttgagtaacagataggcagaagtgatcgtatctacgctggtagtgtaggagaacttatcgttttctacataaatggtgtctatccggtcgtacagttcgtccatgccgtacaaataaagtgtatctgttccgagtcctttgatctctccggtgatggttgtctcattggagcccttcttgcatccgaccagacagataatgatgaggattaaaatactactctttttcattgctttgatttcttttctgcgaaagtacggttttttacagataaaaaaaagaattgcccgtcatttgtaatgacgagcaattctcaatatctaaaatagagtggtaattctcttatttgatgatgctcatgaagtctgcatttgtgaagaacttagagaattccaagtctgttgcagctttcttagccaacgcaggttctttagcaacagcgctcttcaagctgctggttaccatagaagaattgttagttctagcacctagaactgccatcaggtagtctgtgtaagcatctggtttttctacgcctgccagtgtgtttttagctttgttgtagtccttagcaaggatctgagccaaagcagcactgttagtcttagcgtcaccgaatgagttaactgctctttcgtactggccttgagcgatgtacaggttacccatagattcgccaagttcttttgtacctgcagctttaccgaagtaagcttcagcagcagctttgtcacccttgatcaaagagatcaaacctaagttcatgtttacttcaggagcagcgtttacgctggcagctttcttcaggtaagattcagctttgtcaacgttaccagcttgataagcaagcttaccaaggttgttgtatgcgcggtaatcgttagggaactgttttgttgcctgagtatagatagcttcctgttttgcaggatcgttagtcagtgtagcagcatacagcaattcttcgatgttcagttcagaaggattagaagaagcaagcttagtgatttcttcgtcagacttaccgatgatctcgtagttcaaagtcaaacgagaacgacgcagttgaggaaggatatcgtcagccaggttcttgtatacagaagagatgttcttgatttcttgttctctctgtgcaggatcctgatacatagataatacgcgaaggatcagttctttatcctggatgttagatttagaaaccagttcctggaaaccttcccagtcctgtgcagtatatttagcgtcaaccggagcgtcgatcttagctttcttcaagtctttgttcaacatcttggtggtgttgctttcgcggttttctgccagagttgtattcaggcttacaccaccatcaggagaagcataagcagaaacttcgatgttgctgatcttcttgttggcagcttcgtttatgttagcaacttccttgttgaattctttagctgttttcaactcgcttgaacggatgttagcctgttggatcaagaacatgatgttagcatcgtgtttttccttgatgatacgttggaaagcatcttcgcccagagccgggttagcgctgcccaatgtgttatttaccaattcagaagtagagattacaccatcagctactttcacagcggggataacgacttcctttttaccaactttagctttgaattcaagccacagttcagattttgccatttcaggaacatagtcgaaagatgttttcatcgtatagctaccacctactttgtaagagatagtctgatcgtttccttctactttttctccttggaacacagcactttgtcctttagcttcaccgccattccatttcaaaaccggagtaacttctactacagcttttttcttgaaatacttttcagggaatttaccattaatggtagcaggaactttaccacctactgcttccaacacttgtggagtaacagtgaagtagtccgctgacaggggacccattttcttgcacgaagagaaaagtgcaacaacaattgccatgagtaaaggcaagtacaacttctttgtcattttaggtataaattaaatgtttgtaattgaaatatcgtcatatttataaccccttttcaatcctaataaaggaaaaacatcgcaaagatattaattcttaatataattatgtagttagcaggaggtttttatcataatttaatgaaaacccgactctttttctcgccgatacttgatatttcggggatgatgctcgataatctcgctgcgaagcatgtttcggtcgatatgggtataaatttcggtcgtcgcaatcgattcgtggccgagcatgcactggatggcccgtaaattggcgccaccttccagtaaatgagtggcaaaggagtgtcggaaagtgtgcggactgatgtttttggtgatacccgcattttgtgctaattcttttatcatatgaaagatcataatccgggaaagtgatttgcctctccgctggctgacaaacacaaaatcttcatagtcttttttaacttctatccggttgcggtccaagaaataaagtttgatctcgttaatggcacggggggaaatgggaacaagacgttgcttgcttcctttgccttctactttgatgaagccttcatcaaaatagagatcggataatttgaggctgacaagttcggatacacggagtccgcagctgtataatgtttccagaatagctctgttgcgctgtccttcggctttgctgcggtctacggaggagatgatgttgtcgatctcttctacggtcagcacttcggggagttttaatcctatcttgggaccttccagcagttcgctgggatcagcctccagataatccgccataataaggaaacggaagaaggacttgatgccggataaaatgcgtgcctgagaacgaggatgaatgccgatgtcatgcaatcccgcagcgaaacgctggagatcggacaggcatacttcaagaacatctatcccttccagagtcagaaaactcatcagtttatccagatcggtcagataagcgtccaatgtattgggggataaagacttttccagcttgaggtactgctggtactttctgattatcagtgcttgttgctccttcttcttgtttttttcgttgatttccatttcttttttctacctttgtagcctgaaatattgttctttggatacaaaggtattaaaaaagcaggactacggcgatgagaatacaaattattaatggcccgaacatcaatctgttgggcaaacgtgaaccttccatatacggaagtgttacatttgaagactatctggctgagcttcgtaaaagatatgctgatttggagatcgactattttcaatcgaacattgagggagaaatgattgactgcattcagcaggtaggttttgaggtagacggcatcattctgaatgccggcgcttatacacatacctccatcgctctgcaggatgccattcgttctgtgacttctccggtgatcgaggtacatatttctaatgtacatagccgtgagtctttccggcatgtatctatgatcgcctgcgcatgcaaaggagtgatctgtggcttcgggctgaactcgtatcggttggctctggaggctttgttaggtaataaataaggtattaatatattaaataggtaaaaaggctatgttactgaaacagacaaaaatcgtcgcatccatttcggacagacgttgcgatgtggactttataaaacagctgtttgaagctgggatgaatgtggtacgtatgaatacggctcacgctagccgtgaaggttttgaagcgttgattgccaatgtacgttccgtatccaaccggattgcaatcctcatggataccaaaggaccggaagtacgtacaactgccaatgcggaaccgattccatatcagataggtgataaagtaaagattgtcggcaatcctgatcaggagacgactcgtgaatgtatcgctgtttcgtatcctaactttgtgaacgatttgaatatcggaggtctggttctgattgacgatggtgatcttgaactcgaagtaatcgataagacagccgattatctgctttgcgaagtgaaaaacgatgcaacgttgggaagccgcaagagcgtgaacgtcccgggtgttcgtatcaatcttccttcattgacagagaaagaccgtaacaatatactttacgcgattgaaaaggatatcgatttcatcgctcactctttcgtgcgcaaccgtcaggacgtacttgatatccgtgaaattctggatgctcacaatagtgatatccggattattgccaagattgagaatcaggaaggggtggacaacatcgacgagattcttgaagtggcggacggcgtgatggtagcccgtggtgacctgggtatcgaagtgccgcaggaacgtattccgggtatccagcgtgtgctgatccgcaaatgtatcctggcaaagaaacctgtgatcgttgcgactcagatgcttcatactatgatcaacaatcctcgtccgacccgcgcggaagtgaccgatatcgcgaatgcaatctactatcgtacggatgctctgatgttgagcggtgagactgcttatggcaaatatccggtagatgcagtcaagacaatgaccaagatcgcggcccaggctgaaaaagataaactggaagagaatgatatccgtatcccgttgaacgaaaacagtaacgatgtaacggccttccttgctaaacaggcagtgaaagctacatcgaaactgaagatacgtgccatcatcacagacagctatagcggacggaccgcccgtaatctggcagctttccgtggtaagttcccggtattggctatctgctataaagaaaagaccatgcgtcatctggcactttcttatggagtggaagcaatctatatgccggagctggccaacggacaggaatattattttgccgctttgcgccgcctgttgaaggaaggacgtttgcagccgactgatatggtaggatatttgagtagcggtaaggcaggtacacaaacttcattcctcgaaatcaatgtcgtggaagatgcgttgaaacatgcgggagaaactgtattgcctaacaacaatcgttatctctaactgttacatctaaaataaggtttttatgcaggagactgaatctattgatgaatatattttgcagcatatcgatgcggaaagtgactatctgaaggcactctaccgggatacgcatgtgaaactgcttcgtccccgtatggcttccgggcatttacaggggcggatgctgaaaatgtttgtggagatgattcgcccccggcatatactggagatcggaacgtatagcggttattctgccctttgtctggcggaaggcttgtcggagggcggaatgttgcatacgtttgaaattaatgatgaacaagaggactttacccgtccctggctggagaattctccttttgcggacaagattcgcttttatataggagatgccttggagcttgttcctcatttgggcgttacgttcgatctggccttcattgacggtgataaacgtaaatatatcgattattacgagatggttttaaagcatctttccacaggtgggtatatcattgccgacaatacattgtgggatggtcatgtgttggaacaatctcgtagtgcggatacgcagaccattggcatcaaagcattcaatgacgcccttgtgacggacgaccgggtggagaaagtaatcctgcctttgcgtgatgggttaactataataagaaaaaagtaagataaggagtaaatttatggaaacaaccagacagaataagatatcccgcctgttacagaaggagctgagcgagatattcctgcttcagacaaaggcaatgccaggtatattaatatcggtcagcgcagttcgtatcagtcctgatatgagtattgcgcgcgtgtacctgagcgttttcccgtcagagaaagcagaagaaatggtgaagaatatcaatgagaacatgaagtccattcgctttgagctcggaacccgtgtgcgtcatcaattacggattattcccgaattgaagttcttcgtggacgactcactggattatattgagaagattgattctttgctgaagtgaattttcccttctacatagcccggcgttatcttttctcgaaaaagaagcataatgctatcaatattatttccggcatatcagtatgcggggtggcacttgctacgttggcactggtctgcacgctttccgtattcaacggatttcaggatatggtagccagctttttcacagcttttgatcctcagttgaagattaccatccgcgagggaaaagtcttcgacggacaggatgaaaagattcgtgcggtctgtgcgcttccggatgtctcggtatctacagagacgttggaagagaatgcgatggtgcaatataaagaccgtcaggctatggttgtgttgaaaggcgtggaagataactttgaggatttaaccgaaatagatagcattctttacggagccggcgagtttattcttcatgattcgatagtgaattatggggtgatgggcgtggaactggtttcgactttgggtaccggactggcgttcgtagatcctttgcaggtgtatcttcccaagcgtaatgccaaagtgaatatggcgaatcccggggcttctttcaatcgcgactatctttattcaccgggtgttgtgttcgtggtcaaccaacagaagtatgatgaaagctatattctcacttcccttgatttccttcgtaacttattggactatacgacagaggtttccggcattgagttgaaactgaaaccgaataccaatatatcatccgtacagtctaaaatagaaaaaatgctgggtgatgactttgtggtacagaaccgttatcagcagcaagcagatgttttccgtatcatggaaatagagaagttgatctcttatctgtttcttacttttattctgatgattgcctgttttaatgtgatcggttctctttctatgttgattctggataagaaagacgatgtcataaccttgcgcagtctgggagccagtgataaactgatatcccgtatctttttatttgagggacggctcatctctctctttggtgctatctccggtattatactggggttgatattatgttttattcagcagaagtttggcatcattacccttggcggaggtggtggaacttttgtggtggacgcttatccggtaagcgtccatgcatgggatgtagtgcttatttttattactgttttagcagtgggattcctgtcagtatggtatccagtgcgttacttaagcaagcggcttctgtaattggctgaagaagaaaaaggctataacctttgaatacagaggtgtaggtgctttgtagaggagtttgctaaaatggaacagagtgtttcatgtatttatgtagaaactatataaacaaaaagcgcaggcaggagacgaactcctttgcctgcgcttttctattttttctcagtaaaatgaattacttcacttcccaagtatcgtttgtcatcagcaactcctggaaattatgatatttcttcttgcctttgacttcttcaatctgttctgctacagcgtcattgtaggtaggtgcctctacctcacgaatcacaccgagtgcaatcgggaaatcggggccttccatcaaagccagcttcaactgaagagtattgtcctggcaatgagcatcgtgaatcagaatatctttttctgtgatgccattctcgccaagttttaccactttcagtccgaaaccttcctgcatcagtccgaactctttgttttcaccgaacaacatcggtttgccgtgttccagatagatcgcattctttgcacgtccttccttcgttgcaacagaagcgtgagttccgtcattaaagattacacagttttgcaaaacttccacaacagatgcacccttatggttggctgctgctttcagaacctctacagaagcggcgccgtctacagcgatacaacgtgcaaagaaacgtccgcgtgcaccgaatgccagttctgccggatggaaagggtcttctaccgttccgtaaggggatgatttgctgacgaatccgcgttcggaagtcggtgaatactgtcctttggtcagtccatagatacggttgttcaacagaatcatgttcaggtcgatgttacggcgaacagcgtggatgaagtggttaccaccgatagccagaccgtcaccgtcaccggaaatctgccagatagtcaaatccggattagccactttagcacccgttgcaacggcagcggcacgtccgtggatggtatggaaaccatacgtatttacataataaggcagacgggaagagcaaccgataccggaaattacggcgatattgtgtggagctactcccagttcggtcattgccttgtgcagtgagttcaggaaagcgtggtcaccgcatcccggacaccagcgaggctgacctgatttataatcttgtacggtatatactttatcgctcatctcttattcctccaataatttagtaaatgcatctatcaattctctcgtaacgaaaggctgtcctttcacttggttgaactggctgatattcagtccgggtactttcatacgcaggtaaccggcaaattgtcccagattctgttcggctactacgatcttcttatatttacgtaatacgtcggctgtattcttcggcagtgggttgatgtactggaagtgtgcgaatgcaaccttctttccatgttcgcgcatgaagtccatagccagacggagatgtccgtaggtaccgccccagcctacaatcagcaagtctgcgtcttcatcgcccagcacttcaagttcggggatgtagtctgcaatcttgtccacttttgcctgacgcaggtgaaccatcttgttgtggttttcgggttcggtagagatggctccggtttcattactcttttcaagcccaccgatacggtgcatgaaaccttctgttcccggagtcgcccagtagcgtacgcctgtttcttcgttacgttggtacggagtccagttgcctgccatgtccggagttacatacggaggattgatggcagggtagtcattcaggtcaggaagtttccatgcggcagagccgttggctacgaaagcatctgttagtaatacgaccggagtcatgtgttccaaagcaattttggctgccatgtaggcggcatcgaaacagttggtcggtgaagtggcggcgataaccggcatcgggctttcaccgttacgaccgtagagtgcttgcagcaagtcggtctgctccgatttggtaggcagacccgtagacgggccaccacgctgtacgttgacaatcaccaacggaagttcgccgataacggccaagttcatcgcctcacttttcaggcagatgcccggaccggaagttgtcgttactgccagcgcacctgcaaaagctgcaccaacggcagaagcacaaccggcgatttcgtcttcgcactgtacggtttttactcccagtgatttatgtttggccagttcatgcagaatgtcggtagccggagtgatcgggtacgaacccagatatagttccagaccggctttttcggctgcggcaatcagtccgtaagacgttgccttgttaccattaatatctgtataaagcccttttgatttcggggctttgctttcaatcttataagtagaggtagaagcgtgtgtgttggcgccgtagttgtagccatcgttcaataccttgatatttgcttctgcgatttccggtttcttggcgaacttctcgcgcagcatcttttctgctgctgccagattgcggttgaacagccagcaaaccagtccgagcgcgaacatattcttacaacggagaatcgttttattgtccagtccggaatctttcagactttctttgcacatagaagagatgggcacttccagcacttcttgtttaacgcctaattcttcaaaaggattgttggtcttaaattgtgctttttccaggtctctggcttcgaacgagtcggagtcggtaatgataagtccttgcggtttacagaatttgatttgtgttttcagtgcggaggggttcatcgctactaatacgtggcaacggtctcctggagtgtacacctgtcctgcgcctacgtggatctgaaaaccggaaacaccggtcagcgaaccttgcggggcacggatgtctgccggatagtcggggaatgtacagatgtcatttcctaccgtagccgacacgttcgagaagatgttgcctgccagctgcataccatcgccggagtcgccggagaaacgtactacgacttcctccaattctttaaccatcatttcgtctgccataactttaattactatatttaatttaaaaactgattttactttcaatttgtgagcgcaaaggtcggaaagttaatcgaattatcaaaataaatcgaactttattgtcctattgacgccaaataattggaattactgaaaggaacctgcatttttattcttgttaaatcaacagaaaccgttatctttgcaaccaaaataaaagcggccttgtagttcaacggatagaatagaagtttcctaaactttagataggggttcgattcccctcggggctactaagagaaatctgcgggaggcggtgttgttttgcttcatactgtattgagttttaagtattacaatggcttctttaaagattaacgtcttatagcttctatttgttttaataatcaatagaaaaaagcctcttccgaatgttcggaagaggctttttctatttctggaatttattattcttccgtagctgctaccactacttttttgttcttcatcatgttgtatgcaatcggagatgcaatgaacaaggaagataaagtaccgataacaacaccgagaatcatagcgaatgcgaagctgcggattgaatcaccacctaggatgaagatacacagcaatacgatcaacgtactcaatgaagtattgatggtacgagccagtgtagtgttcagagagtcgttgaacaactgacgcttgtcacgtttcggatacaagccgaagaactcacgtacacggtcgaagattaccaccttatcattaatagagtagccgatagccgtcaggatagcaccgataaatgtctggtcgatttccagtgagaacggaacgataccccacagcaatgagtaagcaccgataatcatgatcgtatcacaagtcagagctacgatagaaccgatactgtaagcgatgttgcggaaacggatcaagatatacagaccgatagcgatcagagccagaacaactgaccatacggcacctgtcttgatatcgtctgcgatactcggacctactttctgtgaacttacgatactaccgcctgtgtgattgtcacggtcgatgaaagtagccaatgtgatgttctgtgtcagcaatggcttcagtgtttcgtataagtatgattcaatctcagagtctacattgttaccttcgtctgcgatacggtagttggtgctgatacgtactgttttcttatctgtaccgatagcgatcacatttacatttacatcttcaccaaacttgtcagcgatcagttcacgaacttgttccggttctaccggattctcgaattgtaccttgaagttacgtccaccggtgaagtcaatactttgacttaaaccacgcaatgcaaacgaaccgatacaaacaaggataatagcgcttacgatgatcagtgatttcttattggttcccatgaagtcgaaacgggtatttaccagcaagtttctggaaatcttggaagtaaatgtcaggttcagccatttgtctttattcatgaagtgttcgtaaaccagacgagtcatgaacacagcagtgaagaaggatacaaggataccgataatcaatgtagtggcaaaaccacggataggacctgtaccgaagttgaacaggatgataccggtgatgatagatgtcaggttggagtcgaagatagcagagaaggcatttgaataaccgtcagccaatgctttcttcacacccttgccggcacgaagctcttcttttgtacgttcatagataagtacgttcgcatctactgccataccgagtgacaacaccataccggcaataccggacatggtcagtgccgcctggaaggatgaaaggatacccagcgtgaagaagaagttcaggaacaatgcgcagttggcaaccatacccgggatgaagccatacatggaacacatatagatcatcaacaggatcaaagctacaacgaatgagaaaatacctgcgttaatagattcctgacctagagacggacctacgatatcttcctgtacgatgtgcgccggagccggcatcttacctgatttcaatacgttagctaagtcctttgcctgttcaggagtgaagtgacctgtaatctgtgaacgtccacctgtgatttcagagttcacgtttggagcagaatatacatagttatcaagaacgatagcgatagaacgaccgatgttctgtttggtcagctgtgcccaacggcgtgcaccgtcagaattcatggtcatgcttacagccggtttgctgtattggtcgaattcgtcttttgcatctgttactacgtcaccttccaacggagctttgccgttacgttcggtagacttgatagcatacaattcgaatgtctgtcctttcttatcaaattcagaaggagaaacaccccatttcagacgaaggtctttcggaagttctgactggatttcgggcatgctcagatatctgttgatatcggcagtatccttatagttagcatagccgatcaccggaccctgaccgcttgaattcaactgaagaacagctagcaacggatattgctttttgatttcttccatatttgctcccgccttttcgtctttggcatctcctttcagagtagctgcgagactgtcggcaacgcttacggctttctttgccggagtagcttctgccagcttggctgcggggattgtgtctgcagttgcgttagtggctgtagaatcagcggcagtttcctgtgacaggatagcacgcaattttgagtcagccgactgcatagccggaagaatctcttttgcagtatatgtttcccagaattcgaggttagccgaaccttgaagaagttttctcacacgttccggttccttgatacccggaagttccaccatgatacggcccatcttatcttcgaggctctggatgttcggctgaacaacaccgaagcggtcgatacgggtacgaagcacgttgtatgagttttcaacggcagcctttacttctgctctcaatactttttctacttcggcatctgatgatttctggttaactttatctttcaactgttgtgttgcgaagagttcggaaagttttgcgcccggagcagttttctggtattctctgacgaacaaggtaatgatatcgtcctggctgttgacagcttgttttgcagcttcattcagcgctttattgaagttttcatccggcttgttgtcagccaatgctctgataacatcaggcacagaaacttcaaggataacattcataccaccttttaggtccaaacctaaactgatctccatttcacgacaatctttcagcgtccagttccacagcattactttctcattggagagagagtcaaggtagtcttgttctactttcgggtcgccgttcgcaatctctttcgccttattagtgtaatggcgggttacgaaggagaaggagaggtagaacacgcataccagcgtgagtagtaccgcaaaaacctttacaaatcctttgttttgcattttacttttaatttatgatgattacttttttaatttaattttcagttaaattctgtcgtatacaagtccattttgccgcatacaaggctgcaaatatagtttttttttcacattcatatgtaataagccctcaaatatttgatgtttaagggcttttttgccgttttatttcattcctctgtttttcagtaacggctccaggcttggttccgcaccgcggaaattcttataaagtatcatcggatcttcgctgtctcccttctccaatacgttgtagcggaagaggtcggcagtgtttttatcaaagattccatgttctttgaaggcttcaaaggcatcattgtcaagtacattcgcccaaaggtaactgtagtatccggcagcgtatccgccaatgatatgattgaagtaagtgacgcggtaacggggggcaatttcggggatcagaccgagctcgtccatggcttctttttcgaaagcaagcatatccagattctttacatctgttatcatgtgaaggttcatgtcgaggatggcggcagccagtaactcagtggtcatgaatccttggttgaacgttttctgtttcagaatcttttcgatgatttcatcggggattacttctcccgtctgatagtgtttggcatacattttcagcacttccggttcggtagcccaatgttcgttgatctgagaaggaagttcaacgaaatcgcgtacgacattggtgccggaggtccctttgtattcgcattttgtcaataagccgtgcagagcgtgcccgaattcgtggaacagggtttctacttcgtccatagtcagcagggaaggggtgtttccgaccggtttggtgaaactgcatacgttgcatatcaaggggcggattgctccctgctgttcgcggtaattgctcatccatgcgccaccgctttttccggaacgcgggaaatagtctacatagaatatacccagttgggagccgtcagcgtcttttacttcgaagacttctacatccggatgataggtcgggataccttccagtttgcttagcgtgataccatatagtttgttggcgactgcgaaagctccttcgcgtacattctccagtttgaagtaaggtttggtgtcttcttcggagaggttgtatttctctttgcggagtttttctgtgtagtaccaccagtcccatgcttccagtttctcgcctttaccttctttgtccattaactgttgaagttctgcggcttcggctttcgctttcgggagggcatagctccaaaggttgttcagcaaactcattacgttgccgtcattctttgccattgtctcatccagtacgaagttggcgtagttgttgaagcccaataggtttgctttttccagacggagggagacgatcttgcggatcgtttctttgttgtcattcttgtcattgttattgccgcggttgatgtatgctttgtacattttctcacggagagggcggttctcagagtattgcaggaatggaaggcggctggcgttgtgcagggtgaacagccatttccccggttgtccggcagctttggcttcttcggctgcgctttggcagaaccattcgggcaatcctgctaaatcttctttcttgtctacgaaaagctggaaagcattgttttcattcagtacattattgctgaatgtgatgcctagagtagaaagttctttgttgatttcacgcagacgtgcctgtttctctgcgtccagattggcacctgaacggacaaatcctttgtaagttttgtccagcaggcgttgctgttccgtggtcagattcatggaatctttttgttgatatacagcgtttacacgtttgaaaagttcctgattcagggagatgttatcttcgtgctcggaaaggaccggtgccattttgatagagagctcggtcagttcatcggttgtttccgcatccgtcatattgaagaaaatggcacttacacggtccagaatgggtgcgctgttgtccaaagctacaatcgtgttgtcgaaggtaggtacttccgggcttgcgataatggcttggatattctgattctgctcttcaatgcctttcagaaaggcgggttcgtaatgttccagtttgattttatcgaaggaaggaacaccatactctgtttgaaattcagtgaagaaagggttgctttctgtttttgttccacaggagtacatcatacaacttgctgctaaaatggttaaagtttttctaatcatcatggtatttattaaagttttttctgttttattgcttgcctatatagcaccagatcgggtaatggtccgaatctttgatcgaacggtctacggtacagttataggctttctgattggggctgatcagaatattgtctatccggaaatagaatttattcagattataggagatgcccagtcccctgccggattgtgtaaaggcgtcatccagttgttgagtcaggatacgatgggtatacgaaatggaagcgtcgttgaaatcgccacaggtaataatagtcgggtatttgctgtttgcgatggcgacggctaccgaatccgcttgcgaagaacggatggccgacgcttctgccagtttctttattaattgccggagtcccgtttttaccttcttcgcgttcgggtctttaatcatatcttcataaatcaccttgtcctctttcgtcagtttattggattccagatggttgtttatgagggtgatagtgtcctcatttactttcagggtgtactgcatcgaaccgttgtaagtgctttcatacttgatgggacgtgctgaaagtatggggaatttggagaaacaggccaactggctgcctcctctttccggattgtgaatggaacggtagggatatgctttcaatgctttgctgatgtcttcgtctgtcagatatttcttgtttttggttgaattgtactcctggagacagattatgtcagcctcactgtcagccagataggataatatcggattctttccttcctttttctccagattgttaaatcccatcacattgtaagagaggaatttgatgctgccatccggtatcgtttctactgtagaattgatgggaatataggttcgtatctgtggaatacataccagaaaaccgatgaccggtaataaggcatagcggtagctgatgattacccaaaagagggtgaaacagatgttgacagcaaggaagatggggaaggcaagccccaggcaagaagctatcgggtgtattttcggttgaagatacgggctataggcactcagaatcaacatccctacaaagagtgcgttgactgccaatatcaaatacaggacaaatttgccaatgtgttccattctttatcttttgcttgcgtcgaacaagctctttttctcttccgtcgtcaggctttcataaccggattttttcagcttttccagaatgcggtctacttcatccgattgtgctttcttacgggcgttataatcgtaatctttctcgcgacttgtatcgcttccataatgtactttcatttttggtttgcgtttccatgtctttttctgaaacagggaagcgaagccgtcaaggaaccagttgatccagtaagtcacgtctttgcctttgctcagactggctgcaaaccagagcccggcaagtgcgccgcctaagtgggcgatgtgtcctccggcattgttggatgtaataaagagcaggtccgttccgataacgattagtgcgagatatttcaaacggacggcgccgaaaaggaaaagctgtacccgatagttcggttctctgtaggcggtggcagctacgatggccagcacggaagcggaagccccgacgagtgtggagaacggcaatgtctggctgaaataagggaagatgttataggctatcatgtagaacaatcctccgcagatacctcccaatacatacaatccccgtaaatgctttcccgaaaagaaatagagaaacaaacttccgaaccagtacagccagagcatgttgaacaggatatgcaggaagcctgcatgcatgaacatatagctgagcaatgaccatggctgaagaataaaccggtgaagggaagcaggaagggcgaataaatcgaatattcccgttgcactcaggttgaacagctgcaatatgacactgattaacgtaccgataacaaagatgcctacgttaatgtaaatcagtcggatgaaagtgtttcctcttctgaacgtttcttttaaatcagttataatatgtcccattgtttctacttttttttctccaatacataatcaggataaatccgaatatcatacctcccaagtgggcgaaatgcgcgacattatctccgggattattggcaaaaccggcatacagttcaatcaaagcataaccgaaaacaaagaatttagctttgatagggaagggcagcggaaagataaatagctggttgttggggaacaacataccgaatgcgagcaaaatggcatatacagctcccgaagcgcccacggtggtcagcatgttcaaaaactctcccataggaataatccccgttcctatatccacttgtgaatagtggctgtagtctactatatatttgatgtattgcactccttcctggatgagtcctgcaccgataccacaggcgatataataaaaaaggaaacgtttcggtccccaggtccgttcaagaacagttccaaacatgaaaacggcaaacatattgaaaaaaatgtggctgaatccgccatgcatgaacatataagtgataagctgtgccggattgaagtcactggcgaggaaaaaatgcaatcccagataattagtcagatcgataccgtatcgttgggcgacaagtgtcccgaaaaagactagtacattgataattatcaggtttttagttacagttggcataattttatattctgaatatttaagtaatgaacgcaaaagtacgaataaattctgttttaaagcatggaaaagcttccctattagctctttttcaataatttgctgcgttttttttatgtttttatttgatatgttgttttgttcatctatatttgtaaagtcgtaatgggaaatcttttgtgtaacatatatattaattaatcattttacgtatcatgaataagtctgaacttattagtgcaatggctgctgaagctcaaatgagtaaagccgatgcgaagaaagctcttgatgctttcatttcttcagttactaacgctatgaaagctggtgacaaggtagctttggttggttttggaacgttctctgtaagtgaaagagcagcaagaaccggtattaatccttctacaaaggcagctattactattcctgctaagaaagtagctaaatttaaagctggtgctgaattgtctgcagctgttgaataaacatatagttgaaagaaattagaagagggaggcgcgtgcgtctcctttttttgtatctttgcgcgcaagaaacaacttgattatgaagatagaagataaacttgtagcgtccgtcatcaacggactaaaagcactttacggtcaggaagtccctgagaagatggtgcagttgcaaaaaacgaagaaagaatttgaaggacatttgacgctggtggtgttcccttttctgaaaatgtcaagaaaaggaccggaacagacagcgcaggaaattggcgaatatctgaaggcgaacgaaccagctgtagctgcttttaatgtaataaagggctttttgaatctgactattgcatcggctacctggattgagttgctgaatgagattcagtcggatgaagagtacggtctggtgaaagctaccgaaacttctccgttggtgatgattgagtattcttcaccgaataccaacaagccgcttcacttggggcatgtgcgcaacaatcttttgggaaatgcgctggctaacattgtggctgcaaacggaaataaagtagtaaagacgaatatagtaaacgaccgtggtatccatatctgcaaatccatgctggcatggaagaaatacggaaacggtgaaactcccgaaagcaccggcaagaaaggtgatcatctggtaggcgactactatgtgtctttcgacaagcattataaagcggaacttgccgaactgatggaaaaaggcatgacgaaagaggaagcggaagctgcttctccgttgatgcaggaagcccgcgaaatgctggtgaaatgggaagccggcgatccggaagtacgtgccctgtgggagatgatgaacaactgggtgtatgccggatttgatgagacttaccggaagatgggtgtcggcttcgataagatatattatgaatccaatacttatctcgaaggaaaagagaaagtaatggagggactggaaaaaggctttttcttcaaaaaagaagacggctctgtctgggctgacctgactaccgaggggctggatcataagctgcttcttcgtggcgatggaacctctgtttatatgacgcaggatattggtacagccaaacttcgtttcgctgattatccgattgataaaatgatttatgtcgttggtaacgaacagaattatcacttccaggtactttctattctgttggataaactcggttttgaatggggtaaaggccttgtacatttctcttatggtatggtagaattgccggaaggtaagatgaaatctcgtgaaggaacagtcgttgatgccgatgacctgatggaagagatggtatcgactgcaaaagaaacttcgcaggaacttggaaaactggatggtctgacgcaggaagaagcggatgatattgcccgtattgtcggtctgggtgctttgaagtactttattctcaaagtagatgcccgtaagaatatgactttcaatccgaaagagtctattgacttcaatggtaatacaggaccgttcattcaatatacatatgcccgtattcagtctgtgcttcgtaaagcggctgaatccggaattgtgatacctgaacagattcctgctggtatcgagctgagcgagaaggaagaaggactgattcagatggttgctgactttgcggcagttgtaaaacaggccggagaagactacagtccgtctattatcgcgaattatacctatgatttggtgaaagaatataatcagttctaccatgatttcagcattctgcgtgaagagaatgaggcggtaaaagtattccgtattgctctgtctgccaatgtagcaaaagtggttcgtttaggaatgggcttgttgggcattgaggtaccttccagaatgtaatacctgccctgaacaaaatatatttatgtgttccggaacgggactggatgttgttgaatagaaaaagactgtccgaaaaggaattgtacactatctttaagaaagactttgggtaaagttaatgatagggattacatacttttcagacagtcttttttattattgggtaattactttcgaattatcagggtctttccaccaatatggattggaagcgccgaagctggatgcccagtcaccaaatttaggatacgcttccaaaatgcttgtcgtttctactggtacaaggaaatcggtaccacgtttagttcctacactgataccgctaatctgcagtcccgttggcatattctcattatttacataatataatccctcatcaggcctggatacatcactacctgtgccgaaataagagaaatttattttacttgttggagggaatttcacaatatgtgcttctttatcacgtcctgtattggcagaaatgatgataaaggggttcatattaaatttgctgtatgtttgttcccaaaatttgttattaaagaaaggagtaaatgccgtttctgtaaatctttcttgggcgacgtctatcgttacagtaaacgttttgtttatagctgctttttgattgtcaaaaaggataatagtgggataattttgaccaggttcccggtcttgcccttccatgaattgtgagacgattccgccggattctacggttattttctttatatcactatttgctatacctgtaagctggtaaccaaaaccgttttgccagtttgcaccatcatgtttaggcacaaatgtatctataacttttacgactttacttgtgagaacactcttataaatttcgcgcttatattcgacaatcatatcattcatgtcataatctcctttggatggccaaaaatcttcaaatgataatacacctttaaaggagttataaatctctttgtcattaatggatttgtctgggagttcttctacaccaccagtctcaatggctgatccatctgagaaatcaagatagaatacggcatcgccaaagtttccttttctggtattatctcctgtcggttcaaagttggttgcatcctccataccaaatgcaacgacttctcctgatttgttctttagggcaatggtacggtgttctttgctcttattcaggtcacgaatagaatagaaagtacgtttattattcataatctcctttgtgccttggttgtaggaagactcaataagaaaccatgctatgcttactcccgcagggaactcgttcacgaactttgtgccatcccaatatttcagttctactctgtcgccggtatacatactacctgctgtactgctggaattacacacggcagtcgatatgcgcggataggcaatgatcggtgtaacttgacttatatcagtcggcttttgatcggtagggtaggtgaaataaccgactgtattttgcttggtacctgtactgctgagcataaccagtccgatttctgttggtttcttaacattgatttctatatttacattctcatctatatattcaggataataatcttccatcgctgcacttccacccggcttaataaaaacttcacggatattatacatgagctgcccatctatttccgttggagtagaagaaagataagtaggacatcctatctcattccattcacctaaaacctggaaaccttccggatatttgtagccgctattggtaacccctctactcgtacccttcgcatttcttttactttgtataaaagctttctgatcaaaagatacttttccgtttgtaatttgtagctgaatcgggctgacagttccaagatagtctgaataaaggtaaagttctgtaagataagacggaatagatatgaaatcattaaagattccttttttatccgtagccccgcgatagacaggctcttcttttgtcttgataatgtttccatccttatcttccgatagcggattttcggcatataactcaaaaacaacctgataatttaaaccatagtttaaatcaactgtgcaactagaggatgttgtaaagccaaaatattcatctgcagttttttcttctggagcctgatataagtccttttccatacaaccggctaacgagagtgcgcatagtacccccattgagagagatttgaaattgtttgtttgcataactgtgttctgataatttgattgtgacccgcaaatgtatgtatttaatatatcaaaacaaagagtttggaaataaatcgtttaaaaagaaatatatagcatggtaaatacaacaaaagtccggtaaccagttgatataggttaccggactttgatgtctcattgaatgcaaatattatttcttttttgcggttcgtttacctttggcagaagtgccaggacctttctcatcttgtattttgactaactccaggcaactcttcaaacttagatcctgaggaacaatgtctttagggatcttgtaattattgcctttgtatgcaatgtaaggtccgtaccgaccattcagaatctccagttccggttcttcatcaaacttcttgatatggcgttctgcttctttcgcccgtttttccagaatcagctgctctgcttcttccagagtaactttcatcggatcaagtgttttcggcagtgatacatagaccttgttatgctggatgtaaggaccaaagcgacctatacctacagtgacagtctttccttcatattcccctaaagtacgcggtagcttgaacagttccagtgcttcctccagggtaatggtctccatggactgccctttcttcatctgggcaaagcgaggcttctcttcatcatctgcggcaccgatctgtactacagggccgaaacgaccgattttcacagatacaggcttgcctgtttccggttcttctcccagcatacgttcgccgactttatgttctgtctttatggataatgtcttttctactgccggatggaactgatcatagaaagtcttcatgatcgaagtccattttacttctccttccgctatttcgtcaaattccttttctacactggcagtaaagttgtaatccagaatatccgggaagtattcggtaaggaagtcatttaccacagttcctgtatctgtaggaaagagtttcgacttttctgctcccgtcacttcattgtgactttcatctttaatctgattgtctttcagtgtcagcacattaaatgtacgttcttcaccgtctttatttcctttttccacatattcgcgttgctgaatagtagaaattgtaggagcgtatgtggacggacgaccgatgcccaactcttccagtttgcgtacaaggcttgcttccgtatagcgtggcgggcgttgagtgaaacgttcagtggcaacgataggtccatattccagtttctggcctttctttaaaggaggcaacagacggctttcgtcttcctgttcattctcatcgtcataagactcacggtatacacgcaggaaaccgtcgaacttgataacttcgccgatagcagtgaatacatcaccgcttttgcttatagagatggtagcagtagtcttttccagttccgcatccgccatttgtgatgcgatggtgcgcttccagatcagatcgtacagtttcttttcctgtgccgtgccctccacggattgattttccatgtaagtcggacgaatggcttcgtgcgcttcctgtgctcctttcgtctttgtttcaaagtggcgcggatgtatatagcgttcccccatcatctgtatgatagcgtctttgctgctggctgttgcatattccgacaggttgacggagtccgtacgcatataagtgataaatccggattcgtacaaacgttgtgcgatcatcatcgtttgtgctacggtatatcccagtttgcgtgccgcttcctgttgcagggtggaagttgtgaatggagccggcggtgttttctttaccggacgggtggttatatcttcaatcgtaaaagtcgctcccttacatgcgtcaaggaatgcttttgcttcttctttcgttttgatacggcgtgatagttccgctttcatttctaccagcttgccgtctgtatcgggaaccaggaatatggcaataacccggtaagcggcttctgatttgaacgcatgaatttcgcgttcacgttctacaatcaggcggacagctaccgactgtacgcgtcctgccgacagagatggtttaacttttctccaaagtacaggagacaattcaaaacctacaattctatccaggattcgtcgtgcctgctgtgcatttacgaggttgaggtcgatattgcgtggttgctcgattgcttttaaaatagcacctttggtaatttcgtgaaatacgattcgctttgtgttttccggttttagttttaatacttcatacagatgccaggcaatagcttctccctcgcggtcctcatcggatgcgagccatacggtttctgcctctttagcttctgctttcagcgtgctgaccaaagcctttttgtctgccggaatttcataatcgggtttaaaattcttatctacgtcgatactgaattctttcttcttcagatcacgtatatgtccgtaactagaaaggactttgaaatctttcccgagaaatttttcaatcgtttttgcttttgccggagactcgacaatgacaaggtttttttgcataattctttcttttataatggcttgtaccataatatttcggggcaaaagtaaaaaaaaagattcgccctaccttataatataaggagaaactaatatttttttggaaaaaaataggttttgagtaaatctgcatttcttttgtatgtgcaagtattattaaagaaatgttctataattaaggggaaattaatataaaacagttttatttaaatagaatttcctatatttacacctttgtacagtattatgtggctatttatgagaaagattctatttaaaatatatctattgtttttctttgtaggtattgcacaacctatattgagccagtctccttattattattacaaacaactcggaataaaggaaggactctcacagtcgaaagtacaatgtgttctgaatgatcatcgggggtatctttggattggtacggaatccggtttgaattgttatgaccgtgaccatctgaagcaatatctgcatcggccgggagatgaaagaacactgccttccaacaatatcacttttatcgccgaggactctttatgcaatctatgggtagctacgatgaacggcatttgcctttacgacagagggagtgatagtttcagaactttatcgaataatggtaaaccgatctatgttgcttcctatttattggttgaaggaggaatcttactgggaggatcaggagctatatacaaatatgtctatgccactaataagctggaacctttgtattatgcgcaagaccctgtttattacaatcccttttggcagatgatacgttatgatgaagagaatatcctgctcaattcacgttggcacggcatatattccttcaatatgaagacgtatgaagtgaagaaaatagagtcgtttacagaaaataactataccagtatctatctggactcctacaagcgtctgtgggtaagtgtttatggtaacggactgtattgctatcagggagaccagttgataaaacactttacggcgtcaaattctcctttgacgtatgatgtcattcatgatatcatggagagagataatcagctttgggtagccactgatggtggtggaatcaatataatctctttagatgatttctcatttactaatattcaacaaaaacaggatgatgttcattcctttccagccaatactatataccgcctctatctggacccggccaataatatgtgggcaggcagtatcagaagagggttgattggtataaagaatgtgtatgcctgttcttatcagaacgttccttttggcaatctgtacggattaagcaaccagactattaatagtttctttcaggatagtgacggaatagtctgggtgggaactgatgggggaggtatcaaccggtttgatccggtatcgggtaccttcaaacattatcctgccaccaaatatgagaaagttgtctccattgtggaatatactcctgacgaactgttgttcttctcctttaataaaggactctttatctttcataagcaaacggggcagatacgtccctttgtgctgattgacaaggaaatgaatgatcagacctgtatcaatggtttttctgtcaatatccagcggataacgaagactaaaattcttttcagtgcccagcatatttttatatatgatatggtcacccgtaagtttgatatagtggctactatgggagaagagtacgagcgtcattctccactgataatagctacgaaaggtgcaaagacatacctttccgatctgaagaatatttgtgagtatgattcttcggaagggactttccggacgatttatcaaggacaatacactatcaatgacgcctctatggatcaggatggtattttttggctggcttctaccgaaggtttggtacgttatgatccacggacagggaagagtgaactgataaatacaagcctgtttcaggatgtagcttctgttgttgccgataatcaatatcgaatctggataggaacgagacgtcatttatttgtttattcttcccgtacccataattttactaccttggaggaggtagatggagtcttgcctaacgaattcatctttcatgctactcttctggccaaaaacggagatgtttttgtcggtggaactacaggcatgacggtgataaactctgccgttcattttgatacagatgaggattatacggtcgaactgctggatgtattattaaacggtctgcctgtctcgttatccgaagagccgcaggaagcggctgaaataattcagattccctggaacttttcttccctgcaactgaaagttctgctgaatgaaagcgatgtgttccgcaagaatttctttcgtttcaatatagaggggctcgatcaggaattggcgagttccaattcaaactctttggttatcaattatctgccgataggggagtatacgattaccgcttcttattatacccgtgacggagggtggagtatgaaacaacccattctgcatgttgtggttactccgccttggtggaagaccggttggttctatgtgggattatatatattgttgggagcagtggcttatagcattgtctactacttctatcgcaagaagaaagccaaacagaagcgggagattatgcgtctgaaaaataagatgtatgaagaaaagattaatttcctgacgaatatcagtcatgaacttcgcactcctcttacactgatttgcgcaccattaaagcgtattatcaatcaggagtcggacaagcaggatgtggaaaagttgttggtcccgatctataagcaggcataccagatgaagagtatcatcgatatggtactcgatgtaaggaagctggaagaaggaaaagatatgctgcatatattgccgcatcctttgaatgagtgggtgcgctctgtcggagataagttcatcaatgagtttcatgtgaaaggtatcagactcgaatatgagttggacgaacagataaaagaggtacctttcgatcagaataagtgcgagttcgttctttctaacttcctgatgaatgcgttgaagtttagcgaatcgggcaccactactacactgattaccaccttgtcacaagagaaagactgggttcggatctctgtcagggatgaagggatgggactgaatatggtagacacagactctcttttctccagtttctatcaggggggacatgaaaaaggaggaagcggcatcggattatcctatgcgaagagtctcatcacacaccataaaggaagagtgggcgcttcgaatgcagcgggaaaaggggccatcttttattttgaactacccttattcacggatacttgcggacagctggaaccggcttctgtggaagcagctacaggcgtggaagtgaatgaaccggatagaatcgattataccttcctgaaaaaatattcagtgatggtggtcgaagatactcccgaactgcgaagttatctgaaagaaacgctgagtaattattttgcccgtgtatatgttgccaaggatgggaaagagggattggaacagatcaaagaccgattgccggatattatcatcagtgatgtcatgatgccccggatgaatgggtttgaactttgccgggaagtgaagactaatctggatatcagccatattccttttgtcttattgaccgcctatcataattctcagaatatgtataccggttataagactggagcggacgcctttttgccgaaacctttcgaaatagacggtttgctggcattgattcataatcagttgaggcagcgcgaacagatacgggcaagatataaagatgataagctcttgacgcataaggaagtgagctttagtaatgcggatgagactttcctgctgaaattgaatacattgattgcggataatatgagtaatccggatctggatgttgcgtttatagctactaatatgtgtatcagtcgttcgttattattcaataaagtgaaggccatcacgggtatggggattgtagactatgtgaataagcagcgcattgagcagtcaatcgtgttacttactactactaccatgaacattactgaaatctccgaagtggtcggcttctcttctttgcgttatttcagtaaggttttcaagtctattaaaggagagattccttccgcttataggaagcaggataagtaaatcgcattgataacttggacttaggaacatatactagaaataaaaaaataaatattagtctcatactctcattctatatgaggtaaatagcatataatcagtgtgatatacaatgagagatacttcttctataaggtatctctcattgttttctacgcaaaatgccttcaatttagcttatctctcctccttttttgctcatctctcattccctttccttgcgtaagtaggtaaaactgtctgccttttgagggttaatatctcatatatcagtttcaaataataggtactttgtagctcggataccttatatctttgccatatcaagcctatatacttatgttttcttaccgacatcttcatcgttccacccgggtgaaacgatcttgccactagagtggagaaatctgttcactctagtgatgagatcagatcactcgagtggaacgatgaagatctcctattaaaaatctgataacaataggtgaaaagcacaacaggatagggtcttctgcataagagaaagcggtatatctcgtctattccatcatttctctgcctacaacgtttatgagctttaagtcatagttatcattgtgggcatcttggaataattgccagatcatcacgccggcatagtcgttttctttgatgaacttacatttgttggctatagtagggcggccgttataataagtcttgcctatattatccttgtccgctgcttcatttccaagatgtttgagtatgccgctatagcggattccacgaacgtcatccactgcgccttgcagactttcctcccaggaatatccataaaaaggaagtcctcccactattttacttttggatgcccgacattgttcattccagtatttgaggtctttcacaaagtcatcgtatgaagcatgctggaccggtttatcggtaaacgctccccggtcataactcatcaggttgatatagtcgaagtattgctcccattcggttccgtaattaagccagcggctgttgacggcacaggtcatcagcatatttttctcttttgccaggtataaacctctggcaaaaaccaataatgaggggaaattcttatcccagttgtcatattcctcataatcgatgtcgaagccgtccagtttatattctttagtgaatgcaataatctgctgtatcagttcttttctggctttcggatcattgatggcggtagtgaattctcccggactgttcttagccaaagatatcagaatcttgacattatgcttgtgagccgtttcacgtacactttcaattctcttccggacaggattaatgtttagagtgccgtctgcttttactcttgcaaagctggcattgatatgcgtcagatatttccattctatcgtaggaaataaactttcaaactcccagtcgtcaagcgcaaggtagccgataactactttctgggtgacttccggttggggctgaggctgcggttgaggcacattgggcacctgtgggttgttggtattagaagagggtccgcaactagtgaataaaatgcttacagccgttaataatgcgtataatacatgtttcatgtttaataagtaaaaaagatttaatacccgaaaacaaatagaggaatgaaagttttgaatagtctctatacttccattcctccttctttagaagttcctaaaaaccttggctcctaccttaaaacctatttatctaacttggttatttttacccagtcaatttccatgatggcaggtaagttggcatcatcgataggacctgcccatgagcccggtctgtctcctcctaatcccatgttcaggatgagatagaatgaagaatcttttgtgaacggccattgcttcatttctgcttcattctccagtttcaggtttgagtaagagaaagtctcctgtccattgacgaagaaagtcagtttgtcttcgctccattctaaagcgtagatgttccaatcctgataattgcaagttacttgtgcggtgttggacggatctttgatgttcaaatcatacgtgtagtgagtatgtatcgtatgatggatcgcggattcctgtttcacatgttccatgatatcgatttctccgcaattcggccatccgtcatagatatatttcttcggcatcatccagatagcggggaatgcgccattggggtaactggtgattttggcttttacttccacccgtccgaaggtgaagtcaaacttaccttgcgtttcgataccgccggctttgtattcatcacctattttttcggctttcagtataagtctgccgtcttttacgtaagcctggtcataactttcggacatttcgtcgttccagtcggagcctgctttctggcagagtacccatttggtcgggtccggattgccgtccacatcgaactcgtccatgaagagaacgtccttcatggtgtcgtcaaacttggtcagtacgatagtataggtcgttgtttgattgtcttcggtggtgacggtcactgtctgctcttttttccagttgtgtacaaatgttgccgggtccggtgagatggtggctccatcgctcattagcgtatagtctacgccggtgatggtattggcatcctcgatcgtaccgatttccactctgtgggttgtctggtctatcttcccatgataataggaagtcgtattcgctgacacattatttactgctacggcaaaatcagtgagcggatatttcttttccggagtgatgtaattggtctcatcatccgaacaggcagcagtggaaaatccgatgattgccatgttcagtataagtaatatttttcttttcatcataacttttttggttcgttcattattttacgttggtagtaaagtacctgccagtttgtacaggcaggtactttttctttgtcaatgttacgttggctattcgccccacttcagcggttcgatgtattcccatttgcgtagcggcagtgtgccatcgttgcagcgcaccatgatctgtccacctttctcaacaagaatatttcctggtactttccagtcctgggtaccatcggagatagtggaaatgataaactcatcgttgaggtaccattctaccctaatccatgtaccggtttcattttcttcttgcaggatattccatcccaacttattgtcagcattcgtatccagtgttttcaccgttccggctgcaccgctaaatactttctggctccatggagtagtgctgaggtcactctttccgcctgccacgtgccaacggaattcggtccacggagtggcattaatcatgaagaacatattcatgttgccgttgaacggtccgatgtagatattatatcgtccaggcatcagttggctgccaaagtaataatctccgctcacctctctgttttcttcgttcacggtagttcttgatgattctgaactggcttgtttgattcgtatggtagtagtcaccggttctattccttcttcatcactgagggaagagagaatgatggttccgttgcgtaccgaagagctagtgctgtattctgctacattgataaccaaatcggcacttccattaaattcggtttgctcaaattcataccatgtttcgtctgacggaatctctttcgtaactccccagcgtgaattggctactacgtgaatagtcagctttccgcccacagcttccacttcataccacttgccgttttcgggctgtgcgggttcaatctgtacaccatcttgggtgatgttcacttcctgttgtttgtcaccattgcggtcatataaagttaccactccgtaacgcatggcaccggtattgggggttgctttcagttccactgtaccgttttccattccggaagctccttgactgatggaaagccactcttctccatcagtcaccttggctgtccacttttgattgctaagcacactgaacacttcgggcacatttccgtttttttcaatcatatccactccttcgtactctaagtaggcagtacctttttgagtcagtgtgaattttttaccggtccaataatcgctcttgatgttaatgacctcagtacgatcgtccaagctggtattttcctcacatttgatggttacatcgtatgtcttttccgggttatcacccgtggctggtgaaatggcataccagtcacctttgttttctccgaatatttcccatggatcggttgatttcacctggaaagtgacgctcagttcatcggttgtgccgtcggcgggtagtagatatgagtcttctacacggtagcgcaggtcgacagccttttgcttctcatcgtcatcacagctttgcaacacaggaactgctgccagtagtgtgaaaagtcctaagaaggctattttatgtaatttatcagatttcataaacacttcaagttattgtttacacatttattcataaacttcatagtctaacgacttaaagacgatggtacattccggtgagaatggaccgctgaatccggaatagaatattacgcctttatgtccatccaagtcaaaggcattgtgtttcttaccggaatagtatacttttccgttgatagagaatgttacgtttacttttgtcgcgtcttccggatcaactttggtatctaactcaatggttttgatgtcgttcatgctttcttccagcgtaaattcttcagctgtccagtcgtagtgaagtttaaaactggattttgttgttgaatcttgcggataaattctgatttgtatccaacctgcaccgtttgctgcaccattccagtgccatgtgtcaccattcaggtaaaggaatccatccgttccggcaggcatattgacgctttcaaagttccaaacgattttcccctttccataagagaagttgggcacatatctattttgcgcattgcttcgtatggttgcatatcctgtttctgggtcaatatcttcggctccgtctgcccacatatttctaggctgtctcacttcaacgggtacaccttcaaatcccggaacattgctcttgggataaagcaacacatgtcccactcttgtaataaacaaattgttgtatcctgctttaagcgtcagattattaccatcagcttcggcacttagccattccttaaattcggcaggaacctctactttccactctacgctggagttgatttcgatgtttttctctccgcccatgccattcagttggttggttttttcttcttcattcttgggctcgatgatgataccgtcttgtgtaatggtgaatgatttctcctgaaactctgtcttgacagtgatttcagctgttcttacacctcctgtattttctggtattgtgatggttatgggaattttgttgccatcttcattaccatcgcccgaagccggagagatttgttctacaaactgtgtggaaggaattatttggaatggcttgtttgacacaatattgaaagagatggttccacctactgtcggcacaatctggtcgtaaggaattactactaaatcttctttcgaagcctgctcgatagtaactaccttggtgccttcaacgccttctgccttgatagtcagtttggctgtacgtgctttctttcctgtattgttttccattgtcaccacaatctccgacacaagtgagctggctgcactcatcgaaggagtcggcttgcaccactgctggtcactttcgatcgtccagggagtgttggagctgatgttgaacactacattgcttggagaagttgccaaagcagtataagactccaaagcatctatctggatattgagaggaccttccggctgtgagtcgatgtcaaactcctggcatgctacaaaactgaatgtgcacagtgcaagaatcagttgcattaacgtgttgctatataactttttcatatatcttttaaatattagattagacaattaattaccatcctgtgttttgaggatttaagtttgtattcttgtatagttcgctttgagggatcggatacagatacatgcaatctctccagttacgggtttcgtaaaggttcttgtagaagttgaacgtaccgtccgcttgcttctcgatctttactccgtatagttcccgttgggtagtatcggcaatcttccatctccgtacatcccagaaacgatgatcttcgaaagcaaactctacacgccattcattgtacaggcgttccatgaattcatcttttcccatggaaggaatcaacggcatatcggcattctttctcacttcattgatagcccacagagcagaatacttataagtctcatctgtgtaattgacatcattgaaagcgttgaccatagattccgcatacgttagtaatgtttccgcatagcggtaaatcacccaatgatgcttgctgacagcttctttacccggttcaaagctagtagcttcctgaatgtacttgcgcaggaagtatcctgtcggtgaaccgccttgtgatacgattccgtcgtcggcgccacctttgaaggtttcaatggtgtagtctttaaacgacattccgttggcaagaatagcgcggtagaaacgtttgtcacgattctcataaggtgattgcgggtcaaatgcagggtcttcgcaaacccatcctgtgttttctagggttactttgtaaccgttgactgtctcgaatgcgtccacaaggttttgtgatgggtaattgctgtatgggataagactggaagtgcgtgttcccgcagtcatgcgaagcgggagattaaacatttcgaagtccgagtcatcaccattgatcctcatcagtacaacttcttttgagtcgaggttgttggcactctcctgggggtcgagagagtaaagccctgtgttgataatatctattgctgctttggcagactttttccacaattcggtatccatagaaggattatgtagcttactggcagcatatagcagtgcttttgactttactgccattgcaaagcctttggtcactctgccgatttctgctcccggttcgtttacatagctgtccggcaagttattggcagcgtcgtcgcattcactgacaatgaagctgataacttcgctgaatggtgtcttgccgattgtattggcttcctcttcagtcagtacttccaatggcatggcgatgtcaccgtagcggcgtgccagttcaaagaagtagtgtgcccgcagcactctggcttcgtaagggaaatatttcagctgcttcatccagtttgtatattgtccgtcgtgctcgtagcgtgtgaagtccacttgggcaatctctgctataaagctgttggcagcacgtataccgcgatacagggtccatgaatcgtcataagttttaataggcgaccagttaccgttattggtattctggatattatctgcataggctccgaattcgccgtcatcactggcacagtcgcgcatggaatatctgtcttcggtgaaaattccgccggaggtcgcaaacagttggtagccttgtggcatgtatgagtatacgtgggtaagcattgatttgcttgtaccgaaatacttgtacatgtcttcttttgtcttcaggttgttcgtttcatcaaagtcaaggtagttgcacgaagcaaagaccaacgaagacaaaatggttaagagtatgtatttggttctcataatgttcatttgttactttgcattaaaaattaagtttgatacctgcccaataacttcttgtcgacggataagcgatgccaagttgttccggatcggcaaaatggatattgtctaatgagaacagattggtgccttgtacgaatactttcaggtcggcaaagcgagtctgcgatttcgggaaagtataagctaccaataggttacgcagtttcaggaatgaaccgtcacggtaccacagtgagctggcgcgatagttattcaagttttcttgagtagtcagtctcggcatggttgcattggtcttattctccggtgtccagcttatttcttcattcaggaatgtatttgaaatgttgccattgcttacaagtggactataaagcggactgttgagcaatgaaacagtgactccggtcattccctggaaatcagcggaaagctccagtctcttgtatgagaagttcagattgaatccgaaatagaagcgtggaacagatgaaccgaacattttcacaatgtctttctcgtcgatgcggttgtcaccgttctgatctttgtatttcacgtcaccgggagctacgtccgagaaggtttgttgcggactgttgttgatttcctgctggctgttgaagaagccgatagcttccaggccgtacatctgtccgatacggttgcccttggtatacaggtagtcgtattcctgatatgcctggtttacattgactacctctgtattcagatatgacatgctagcaccaataccataatggaaatcaccgatcttatcattccaactcaaagaagcatccactcctttgtatttatagattccttcgttcacctgacctactgtgataccgataataccggaagtagaattggcacctgacacaagtatatccgaacgtttttcgtagaaaccttctactgttgcattcaaacgattatcaaaagcagcgagatcaaatccgaaagtcgctttctgtgatttttccgctaccaggccgataaccggcagatcgccttcactgccaccggactgtcctccggcattcactccgaagttataaccggcaccgccgctgccataagactgacgccatagttcgtggctcagattgccgtcccatccggacagaccgtaagaggcgcgaatcttaaagagattgatcggtgtcaccttttccataaatgcttcgttggaaacgatccatgcagcggaaacggcaggatagttcgagtatttgtctccgtcgggcaggtaagctgatcccgaacggttaaatacggcattgaggctgtaacggttgtcgtaagtatatgtggcgttcaccagcacagactgattcttctgagagttgtttctgccgtttttgacaacagactgcatatcataaatcaatgctcctcccacctgatgtttgccaaaagtgcggttataatccacctttgcctggaaatcgctgcgtagcatcagcctttcgaaaggctgtgtatgtcccagtgtttcggagtctgtaccataaatggcaggagttgtcaccagtgtaccatcgctggtgatacttgcattgctgttcatgtaacgatactctttattggtggtttcattcattcctccgatattatcgaaagagacggatgcttcggctgccagccctttggtcaacgcacttaaatcctgacggatgcttaggtcggcgagtagtgttccgtatacgttacggatgtgtccgtagtctttcaacagagctaccggattaccggttccgtacacagaactacctccataaatgccattctcataacgaatggggaatgcagcggatggaatgccatagattttgttgaaaatagcgctgcgtccatagcgggtacctctgaattctttcagtctgcctacaatgccggctttcagcaatgtgctttccgtcacttttacgtccagattggtacgtacggtcagacgtgtgtctgtaggtgtagtgtcgaaacgtgtatcttccgtgtttttcttcaacatggagcgatcccggtaatagtcaactaccgtgtaaaaacggaatttgtcactacctccgctgaaagacattttcaggttgtgggtcaatcctgtgttgttcagcgtttcattccaccagtctacattcggataatcatacggatagattcctgtccggaaagcatccagttcctgcgcattgtagcgtgcaggcagaccgtctccgcttaatgcggtgttaagagcgttcgcatacgtataggcatctgcgaagtccggagaacggaattgggtattgacaccgaaattatagtccacatttaccttcagaccattgcttattccgcgtttagtcgtgatcagtactactccattcgcaccacgcataccgtagagagcagcggctgccgcatctttcagaacgtagcatgattcgatttccatcgaagtgatgtcactgatatcacgtgggaaaccatcaattaatactagcggggcatttccgtgtatagagagggtggatacgttatcggctgacgagcctgtaccctgatatacattcagacctgccacttttccatacaaagctttgctgatatctatgtacggggatttttcgaatgcggaagcattgactccgttgatagagtaactgctggtccgggaagatacgttcatctggtagccgatgctcagtgtatctgccagctgcatttccgaagcagctttcgatgtctgtgcattcagggataccgaacctcccaggagcagagtgattaatatataatttattttattcattgttcaaacgatattagttaacgtgtcatttaccagcccgggttttgggtcattccatattgcttgttgatttcctcctgaggaatcggagccagataccacttggtatcccagttggtagcccagtaatggtctcccagttcgatcttctcgaaggtgaactcagtcggattgttcaggtcgttacctctgcttctgagtccgtacaacttcttcttgaagtcgctctgacggtctctgcgaacgaggtcgaaccagcgtacttcttcaaatcctaattcgagtgctctttctctcagtactgcttcgaggaactgatcgtgattcatcgtcttggaaagttccggcagacctactctctttcgtacatcgtttaccattttgtaagcctcgtcggtagggcgtccgttgacttcgttgagtacttccgcatatcccagcatgatttccgccagacgggtgtgtgaccattgtaccggaccttcgcgatcgttgttttcctgtaagatgtacttcatgatcaggaatccgctaccgtctttgtagtcggcatggttgatataaacaggagctgttgttccgttgcagtaggtgtctccgggacaagctacattttcatacagacgtgggtcgcgggtgggcaccatttcgccttttgtaaagaacggttgcttggagggtgacttccagtcgaaatttgccggaaaatcagttccgtcttcccacggaaacatatctacatagttcaatgtagggccgctgtaataacgttggccgataaagctgctgtgaacatcggagccatatccttgacgggtagagattaatatttctgttccgccgcggttgtagtaggcctgacgataggccagacgtcttgcccggtgcgtctcttccgtaggttgaatcagttcgtattcgtgccgtttttgtaattctgtgaaaaaggctgcgcctgcttcggcggcatctttccatcgttggtcgctgtaatttccgtaacaggtatattcgtctgcttccggatgccatttagtgtttgagttgaaagtcggactggctgcccattgcaataccttgaactttaatgccatcgctcctgccagggtcatacgtccgtcatctgctttctcggctttccaggccagattggagttgatggcttcgttgagcaatcctacgatcttctctaccgtttcggcaaaagtgatacgggggaaattcattgtctcgtttacgtctacatagtggtccagccatgtcacaccgcctacatatctcagcatttcgaaatagcagagggagatcaaaactttggcttccgcgatccgctcgcttttctcgctggctgtcatgtcgggcactttttctacgttctcaatgtacaaccaggcataacggattgtagtccagtcggatttgcttccataacggtaagcggaatttttgggaacattgttggcgctgagtgctccgttgtaatagagcttgacaggaccgtcactgatattatcacggaaactataacataagtctgtgattgattcaagtatgttcacacccaatttgtagtcagagccggtcggtagcccataaggtaatccggtatatgctttggtcagcaccttttcggcatttattttcgaagagaacatttcttcggtagtcgctccggaactctcaggctggtcgcccagaaatttatccccgaagctgatttcagaacaggaggaggctatcagtacgcaacccaatgctattccgagtccttttattattctattcatacagtcgttttttagaagttaagatttaaaccgaagctatatactttgatcagcggataatctccgaatcggttaggatcactttccggatcaagatatttaagcggtgagaaggtcagcaggttgtagccgctgaagtttaatccgagtgagctgaggcccagtttcttcaggaatttctttccggtgatggtataaccgaagctcaggctcttcaagcggagataggaagcatccaccaaccagagggtagagggttcggagttccagctttccgattcttccgacggacgcggataagtagctcccagttggttttccggagtccagcaaccgtcgtagaagtaggtcagcaaaccacgctttccggcattcgtataagggatacggtattcgatgtcatacattctgttaacgttcttggaacccacccattgcatggtgaagttgaatcctttccagtcgaatcccatgttcataccgaaaacgtattccggacgggtagcataacctgctacgctcttgtcattaccgtccacgatgtggtctccgttgaggtcggcgtacatggcgtcacccggatataccttctgataaggctgaggcagttccggctttaaggtcagttcgccgtcggctccggtgatgaagtcgctgtactgatagagacggatgtagttgtatactccggtctggcgtccggtagagccaccggtctggttcatataagagaattgcttgggcacttcgtccatatagaggattttgttgcgtgcgaaagagacgttggcatccacattataggtgaaatcctttccgatcttatcgcgccagccgagagaaacttcgtaaccgtggttgtctaccttaccaatgttcaggttaggcagtgcagttgcgatgatgcttggggtcgattccggagagatcagaatacctgtgcggtgttcgataaagtagtcgaaggtagcggacaggcggctgttgaagaacttaagatcaataccgtagttctgcttgtcggctgtttcccaggttactgccgggttacccatacgtgagatggctgctgccgattgggaaatcggattgtccacaccgaagctgtaactgcccgatgatccccatacggcaggcatgtacataaagcgtgagtctactcccttgtcgttacctacacgtccccaggatgctctgagttttaggtagtctacgattttctggttttccataaacttctcggcagttgcgatccatccggcagagaaggaagggaatacaccgaaacgtgtgctgcccggagcaaagttctccgaaccgttgtagccgacgtttacgtcgagcagatatttactttgataggcgtaagtagcacgtcctaccaatcctacgtagttacggggcagataagtgtagctgtccggataatagttacgcgactgattgtaaaggaacagaccggatattctgtggtcgccgaatgtacggtcatagttgatacgtccttccagataccagttctgtccgcgtccgctgctttccgagtaagtgagcggagtatcgctgccgctgggtacatagataagtgatttatcgtagtcgggatcggtctgtgacatcgtaccgttggtgtcaaagtatgatttgtagtacacagtctgcgcttcgatggcgcctcccgtacgtactttttccagtttgaatttattgtcgtaagcacctttcacggaaacgctcagtcccggagtgataaagtccagtttctgtgtgatgtccaaatccagattcaatgtcgtgtcatacgtttgattgtaaccttgtccgtagaatacgaacataccgtcacgcatcacttctcccagcggaaccatatctttaggaatcagtgtacgtactccgttgataaatcccggtccggcaaacggatgtgaccagatctgtgcgattacccaaggattctggtcttcacctgtgcccgaaacgacgctgcgcggttcctgtatcttgcctaaaacaccaccgacaccgagtttcatcgaagtagtctttgtcagattagcatcgatattggcacggtagttatagcggttgtaacgatagttattgtcgtacatctgtccgggaagttctttcagaagtccgttctgataagtataacctacagagatgaagtatcgcacattatcgctaccgccggagatatttaggttgttttggctttgaagatagatattattaaaaatatacttcttccaatccatactgggatacatgatcgggtctgagccggtacgataggcttctacctgttccggggtgaagtataatttaggattcgttacgtggtccatctcctgcttcatgttccagaagcgtgcgaactcgtaacttccagtctgttctaccagtgagatgggttgttgcagacccagtttggtgctggcggaaatctgcgttttgcctgctttacctcttcgggtggtgatcaatacaacgccattagcacctcttactccgaatacagcggtggaagaggcgtctttcaatactgaaatactttcgatttcgttcgggtcgatttgtgaaaactcacgttctattccgtctactaaaaccaagggcttggattgtgaatcatttaatgaaccgacgccacgtacgtagatggcagcagcatctttacctggttgtccggtagtctgtacggaagatacacccggcaatgctcctgcgaggaggttcgtgatacttgttgccggagatttgatcaactctttgttgtcaatggaggagacggcactggtaagcatgcgcttgtcctgattaccgtaggcgatagctacaacttccacttcaccgaggttctgtgcatcttcttttaaggaaacattgatgattgtcctgtctccgaccacgatctcctgggttacatacccgataaaggaaatgttcaatacggattttttgcttggggcgacgatcgtaaagttaccgtcaaagtctgtgattgtcccaatgctcgtgcctttcacagtcacattagctccgggaacgccttctttgagtgtttcatccgttactctacccttaattgtgataccttccgggggcaaggcatacatcaacggtatgaataaaagaaacgtaacaagaaagcagaatcttaaattgagcgcgtttctcatactgtttaatttgataggttaataatatatttagtttatagttaggtcaaccgggttgggggtgacttttattctctttattctctcttcagtttctaaatatatcctttgcttatgtgcaataaggttaacttcatttatcttttaatgatgatgcaaaattaggggtgatgtgaaaaatggacgtgcaatattcaccaaattaggtgcacaaatagctagaaacactatctgtaacaaatgggtagaccttgatacaaaattatagacggaatggaaaaggaggctttgtaaggaacaataaaaaagcccatcctgttatgttgcacataggcaataacaggatgggcatctgattggttcttctctttggagaatatgtcttgtctagaagctgaagcttaatcctcccaggaagttaagaccttctgtaggatagcccagataatactggtatttcttattgaggatattattaatccgggcatacacggatactcctttgaacacattatagctggctccggcatgcaggtcgctgactgctgcggctttaatgccttctacctttgtgcgtccgatataatcgtaaccgagattgatattcagtcctgtgatcgggcggaagtctgcgctgaaattaatttcgcaggcgggtttcatatacaggctgtatttttctttcgcatcccagttacggtaagttccagcagcgaacaatgcaatgaggtctttgtattcatagctgatcttcataccagcgtagaagttgttggcattgctaaattccagattcagatattgatgtgctgtgaccggggacgaggaattcccttcctgagcatcaccggcaagtgagggatcatagttgacaaatgtttcttcctgcacctcaaagaaatcgtctttcaaatcctgataaccgccatacagattaatccataatccgggataaggactcgctttaaatcctattgctgcattcagctgttcgtacgtatcgagaatagggcctgccggcaaggcataaggacagatcgtttccagtctgcggaaatcgttgaccagcttgcctccggtagcttgcgcatagagtacgtagctgtcggagaagatatactgtgctattacatccggagacacgcggaatgatttaccgctgccgaatgagatatccacattggctcctgcacgcaggttccagctgtcgctgctgagtttataatgcggattcagtgccagagcggtacggttctcgtatacctggaggtcgtcagcaagtttcaggtctttattgtagatgagattacgcatgtccaatccgatgttgatgctctgttcgtcgctgatagcgccgctgatcaatcctttggtatgcacttgtgtttctctgactttgtcattgaaaaagaaagtgttattgttctgacggttgtacatcatcagattggtttccgcttcgaactgtatgggataattttcatctgtcgattttactcccagatggaagtctcctgaagtaaacttctgcttgccgggctgaaccggagaaaggttgaaattgctgagtccgaaattagcggcgatgttgaaatctaccttgttgaactgatggatataatcgatattcgcacgggtacggtaataataagcattccatttcgtgtctgtttccggcatagtcagtttgccatccattccgtccatctgaaagcggacgttcagcttgtccctgtccgacagacggaacaggtaattggcaaggagatccagattaccgtagtttccatatccggcgcgtatatatccgggcttgctgccgggctgcacttccgttcctacatagggacgcatcaggtcggcagggatagaggtagccgggaagaaagtagtggcatattccacttcctttttgctgacggtaggttcttccactttgggtagcacattcactttggaagcatccagaatgtcgggattatattcctgttctacgacgaccgtgcggttcatggtcgtatctttcggctgagtattctgtgcctggaggttgaacggcatcagaaatgccagtgtaaagcctcctgctatataaagagttcgtttcatacttttcaatctttacttgtttagtttctttagtctgtcttcaatcatgctctcgatatcgtcattgccctggtaattctgttgcagactcagcagatactggcgtgcgtcgaggtctttacccatagcgacatatacgtccgacaggaggacaaagctgcgtgccagccaataagcgtgtggcgtactctgttcgatgtagttgagcagctctttttctgccgccgcatattctttggcatcgtaaagtgcttgggcaacctggtatttagcttcggcaccataagaattacgggtatccttggccagttcgcggaaatcatccaatgctttcttgtccgctttctgattcttataagcttttgcgcgataataaagagcttcgtttttcagttccggactaagcttggcttcagccagcacctcggtagccgcgtgaatcgtttctacgtcgtctctcagcaggaaggcacagcgcaggatgccggtttcggcaagctggcggcgttctacattggtcgctttttctttcagcatcttgtagcttgccagagcttctgccatctgttgctggttgaactgtacttccgcacgcatgatcagcgcttcttctgcgaatggattattcggatattcaagcaattttccggagtggaggagcaccatatcataattcttctgctcatttccaatctggcagaggtaataatgtgcattcaggctaaatgctccttctgggaaagtttgcagatatttattaaggctgctcttggcttcttctgttctgccacgtgcataaatcttttcggcagccgcatacgtaagtgagtcctgttcgctggcgtcaaagcggatgtgtcccggcatcgcattggctaaagccgcaaattcatcgatacggtttaaatctacatagatagatttcatatcgcgcattgccaggcgggcttcttcgctgcccggatatttctcaatcacttgtttgtacgcattgattgcctggtcgaagttgccgttctgataatacagcaaaccgatttcagccgcagctttccggctgacggggctttcgggatatttctccagcaattccttgaaagaagtaatagcctgactgttgttatccatcagtacatatgaacgccctttttcgtagatggcattcactgcgtatggagaagaaggatatttgccgaccagcctgttcagaagagtgatcttaccggtatagtctttctgtaaaccggataccagtgccagctgatagaatgagtaatcgccggaaggagtattcatttgttcggcttgcgagtagtagtgcttggcttcttcaaagttgcgcacattcagatgacagtctccgatacggttgtaggcatctgcaagcgctgttctgttttcgcctttttccagttggatatatttttggaaataattgcttgcctgtgtatagtccttgcggtggaaagcaatgtatcctaagttgtagttggcgagcgcatacatttcattatttggctgcgtggtcagttgcaggtaagcgttgaaatcgcgggcggcttccatcatccggttgaggcggtagtaagattctccgcaccagtagtaagcgtccgcctttgtctggcggttgtactgcccgatggtgatggactggttcagatattggagagcctgttcgaaattggcattggcaaacgactgtgtacccagttggaagagaatcttttgtttggcttccatgatctgtgcactcggcttggcaatccgttcgattgactttaaagcagcttcgtagctgcgggtatttatatagacttctaccagatagttgcttactttctcggcatacggagaagtcgggaattcattgagaaatttctcaaaagcagtaaccgattcaccgaaagcggagtaggacgtttcgtgcaggcaaagtgcatagttgtaagcggcctgttccttaatctgcaggttggcgttggaggcggctgcctgttcgaaagccatacgtgccttgttcttttctgccagttgcaggtaagagagtcccatgtgcaggtaagcattctgggtcagggcatcgttggcggtcgtcacttgtcccagcatttcggctgctttggagtagacttttgtctggtaataggagagtcccagcatataaagtgcatcccggcggggagcagagtgatctctgtccagatagccggtgaatgcttccactgcctggtgatattgtccgaaatggtagtaagcgtctcccagaatgcggtacatctcggcagcgtgctcgttgttcggataggccgacaggtagttttgtgctacgatctgcgccttatcatagttctttttgatagcatagatttctgctatgtagtaaggtacgagttctttgtacttcgggtcgtcctgcaaagggaggaagtctttcaacgcttcatcatagcgcttctgagtgtagcggatataagcgagatagtaactgcagtcctttgcatatttgggactgctggcacgtaacgtttcgaaccagatggcggcttctttcagattatcagtcttcatgtagcaggttgccagttggtaggtgcggtcgtcgcgctcctcatttcccagtagatcgagccgtgtagaattaaagagtgccagggcctcatcatatttcccttcatagaagtagcaggaagccagtagtgaatagattcggttggcgtagggagtatccggataacagtcgaggtacttgcgcagtaactcgatgcggtttttgtctttcagttcataagccgaactgactaacatatattctgcgtcctgaaggagacttgctgttggcttttgctttacaaatgctttcaatgcaggtatggcagctgcataatttttttcctggaaaagttctttcccttctttataaaggttgacaggagaggttatcttttcgcttgtctgtgcggagatggcaattggtgcacaacacaacaaggtgcagataattcgtgatattcttttcttcataatctagtgttttgacaaaaatacgactatatcttccaacgaaaaccctttgaaagttattttataatcatttaaatctttatgtaaattatctctcatccattttgaatccgaaatacttattctttttggactcttttttatcttcctgatgagagtaattaagtctgatgttgaatttcatgtgattgttgttttataattattggtggttacaaagataatacgaatcttagtattttcctcatttaaaacgttttctgatacccaaaagtttagtgccccttttagttaattgtgttgagccagaaactgtacaagtccccgccgaatggaatccagcccgaaatcttccggacgtatctctgataatggcaggaagaaagaatctgccacgtcatccattgccgagaaatggctcatgtcttttacggtacagagaaagaacatatcgagcgtatgaacggaaaagccggaatagatataaatgttcggcagggagaactgataggtcgctttttctaccttcaatcctgtttcctcccatacttccctgcctactccttcttctcctgtttcgttcatgtcgataaatcctccgggaaggtcgagtgtccctttggccggttctttggcacggcggcagaccagcagttccttcttttcattcagaatcagtgccacggtagcggaagacggattgaaataataaacaaagccgcagtctgtgcatttcttagacttctcgttgttcacttcgaagtgcggagaaccgcattcgggacagtacaggaattgggcaagaggatgtttcatcataactgattttatataatagattgtttgccgacaaaaatataaaatcttttcttcagatatggaataatgtgattacaaaatgctaaataccccgtcttattagtatcattaataacaatcatatacaaattaaaagaatcagactatgaataacaaaatgaatattcctttatcaggaattattcctccgttggtaactcccttgttggacgatgatgtgttggatgtggaaggtttgcaaagattgatcgaacatctgatagcagggggagtacatgctctttttgtgttgggaactaccggtgaatcacagagcctcagttataaattgaggatggaaatgattaaaaatacctgccgtatagcgaaaggacggttgccggtattggtatgtatttccgatacttcgattgtggagagtgtgaaccttgcctgccttgcggcagatcatggagccgatgccgtcgtttccgctcctccttactactttgcgacaggtcagcccgaactgatcgagttttatgagcatctgctgcctcagttgccgttaccattattcttgtataatatgccgactcatacaaaggtgaactttgcaccggctacgattcagcggatagcggagaatcccggcgtaatcggttttaaagacagttcggcaaatacggtttatttccagtcggtgatgtatgccatgaaagataatccggatttctcgatgctggtgggaccggaagaaattatggcggaatccgtactgctgggggctcatggcggcgtaaacggtggtgcgaatatgttccccgaattgtatgtgagcttatacaacgctgcgaagaatgcagatatggaagaagtgagacgtttgcaggaaaaagtaatgcaaatcagtgctacgatatatacggtagggcaacatgggtccagttacctgaaaggtctgaaatgtgctctcagtctactcggaatatgcagcgattatgtggctgcgcctttccataagttcgaacaacgggaaagaggaaaaatatggaaggcacttcaaaatttgggagttgatgtagtgctcaggtaattaatcaagaaaaaatgaacggctatgtctattctcgacattattatctttttattcttcacggggggagttgttgtcttcggctgctctttcttcaacaagaaacgttcgtcggaggaatttacttcggcaggacgttcccttccgggttgggttgtgggaatgtctattttcgcaacgtatgtaagtagtatcagttatctggcttatccgggcaaggcctatatgtccgattggaatgcttttgtattcagcttgtccattccgatagcctcgtattttgctgctaaatactttgtacccttttatcgttctatcggaagcgtatcggcttacagttttctggaagaacgctttggtccctgggcgcgtgtatatgcgtcatcgtgttatcttttgacgcaggttgcccggatggggtctattctgtatctgctcgcattgcctatgaatgccctgctgggatgggatattaagatgattatcgcagtaaccagcgttgccattattgcctattcaatgctgggtggtctgaaagctgtgatatggacggaggcgattcagggatttattctgattggtggtgcgatagcctgcctttgtgtgctgatgtttaaaatgcccgaagggcctgcgcaggtatttcagatagccattactgaccagaaattcagtttgggaagtttcggcagcagtctgaccgagtctactttctgggtatgccttatttacggtatatttatcaatctacagaattatggtattgatcagaactacgtacagcgttatttgacggcaaagagtgataaacaggctaagttctccgctctcttcggaggttatttgtttattccggtttctgcagtgttctttatgataggtacggcattgtatgcatattacaagacgtttccggaactgcttccggcaggggtcgagggggacgcggtctttccctattttattgtacatgcgcttccgaccggacttaccggattattgattgcctccattttcgcggcgggaatgagtacggtggctacaagcattacaagttcggctactatcattctgacggactattatgcccgttatataaataagagaccgacagaaaaacaatcggtgagagccttgtatgtttcgaatgtactgatcggaataatcggtattttcgtagcgctggcatttctgaacgtagagagtgcgctggatgcctggtgggctttgtcctccatcttcagcggtggtatgctgggactcttcctgctggggtatatttcaaagaaggcgcggaatgttgacgccgttttgggagtgatctgtggcattatcgttgtcgtctggatgagcttgtctcctatcttctttaaagatggttttatgagcgaatatgcaagcccgtttcatgctaacctgactattgtcttcggaaccattgttatctttttggcaggctttctcagtatgcgtttactgaaaacaaagaagtagaagaaggcagcttcactggcaggcatattggtttcatctattatccgatagaattattcgattggactttttttgcaaaggcggggtttccgcctttatctttgcatcagaaacaaaaaacaaaacgatgtttctgatgttataagtcaaatcaattaataacaataaaagcaataaagagtatggaaccaattttaaattctcaacttcctgaattcagtgttcaggcttttcaaaacggagctttcaagacagtaaccaacaacgacctgaaaggtaaatgggcaatccttttcttctaccctgccgactttacatttgtatgtccgacagaattggtagacatggctgacaaatatgctcagttccaggaaatgggtgtggaaatctactcggtaagtactgactcgcatttcgtacacaaagcctggcatgatgcttccgaaagtatccgtaagatcaaatacccgatgctggcagacccgacaggcgctttgagccgtgcactgggtgtatatatcgaagaagaaggtatggcttaccgcggaacattcgtcgtaaacccggaaggaaagattaaagtggtggaactgaatgataacaatattggtcgtgacgccagcgaattacttcgcaaagtagaagccgcacagtttgtggctactcacgacggagaagtttgcccggctaaatggaagaagggcgaatctactctgaagccaagcattgaccttgtcggtaagatttgatagatcttgataatgtgtgtgaagggccggtaacggagacgctgccggcccttcttttaaaagaatgaaaggagaaagagagatgttagaacctgcattaaaagaacaactgaagggtatttttgccggactggaggctgactttacctttgatatatccgtatcagccagtcatgaaagccgtgccgaattgctggaattgctgagcgatgtagccgaatgttccgatcacatcacttgtatggtaaatgaaggaagcggacttaaatttacgataggaaagaatggtaaacctacagaaattactttccgtgctatccccaacggacatgagtttacttctttattactcgccatcctgaatctggacggtaagggaaagaattttccggatgaggctgtctgcaaccgtgtgaaagccttgaagggtccgatacacttagtgacctatgtctcactgacttgcaccaactgtccggatgtagttcaggcattgaatgcaatgaccacactgaatccttccattactcatgaaatggttgacggtgcactgtatcaggatgaagtggatgccttgaagatacaaggcgtgccttctgtatttgccgatgggaaactgcttcatgtaggtcgtggcgaatttggcgaattgcttgctaaactggaagcgcaatacggtattgatgaaaccaaggtggagacggaagtgaaggaatacgatgttatcgtagccggtggcggtcctgccggagtatcagcagccatctattctgcccgtaaaggcttgcgcgtggcgattgttgccgagcgtgtcggcggacaggtgaaagagacggtaggcattgagaatctgatttcggttcctgaaacaacaggaagcgaacttgccgataatctgaaaacgcatcttctgcgttatcctgttgatttgttggaacagcgtaagatagaaaaggtagaacttgccggaaaagataaactggtaactacttccgtaggagagaaattcattgctcctgcattgattatcgctacaggtgcaagctggcgaaaactgaatgttcccggcgagaacgattatatcgggcgtggagtcgctttctgtcctcattgcgacggtcctttctataaaggaaagcaggttgcggtagtgggcggtggaaactccggcatcgaggcagccattgacttggcaggtatctgttctaaagtcaccgtctttgaatttatggatgaactgaaagcggataatgtccttcaggaaagacttaaatctctgccgaatgtggaagtattcgtgagttcgcaaacgacagaagtaattggtaatggcgataaactgacagccttgcgcatcaaagaccgtaagacggaagaagaacgtttggtagaactggacggagtattcgtgcagatcggactttccgccaattgcagcgttttccgtgatattgtggaaacaaaccgaccgggtgaaatcgttatcgatgcgcattgccgtaccaatgtgacgggaatctatgcagccggagacgtatcgaccgtaccttacaaacagattattatttctatgggcgaaggtgccaaagccgccctttctgcctttgatgaccgcgtacggggcatcatctgataaaatagattatttatacatttcccctcatgtataagtaatggccacagagattgtaaaaagtctcttgtggcttttatttttttcttacctttgtgattctaatatttaacccccaatgagaaacatgaaaaagatattcttactgatttccgcgatcttgttaattgttccggtgcaggctcagcatacgttgagactgatgacctataacatcaaaaatgcaacaggcatggatggtgtctgtgacttccagcgtattgcaaatgtgattaataacgcttctcccgatgtggtagccgtgcaggaagtagacagcgtgaccaatcggagtaatcagaaatatgtattaggtgagatagccgagcggacacagatgtatgcctgctttgctccggctatagattatgatggcggaaaatacggaatcggtctgctgtcaaagaaagctccggttcatttgcagactatagctctgcccggcagggaagaagcccgtgcattgatcttagcggagtttgaagattatatttactgttgcactcatttatcccttacggaagaagaccggatgaagtcattggagattctgaaaacttttgcagcttcctataaaaagcctctttttctggcgggagacatgaatgcggagccggaatcggactttattaaagagttgcagaaagaatttcggatactctctaatcccagacaacacacttttcctgctcccgccccaaaggagactatcgattacgtggcggcttttaagcagaatgataaaggatttgccgtcgtctcttcggaagtggtgaatgaacctgtagcatccgatcatcgccctattgttgtggaactgcgcactgccgaaaaggcggataagatattccgtactaaaccctatttgcagaatccggttggaaatggaatgaccgtgatgtgggaaaccactgttcctgcttattgttgggtagaatacggtacggatacgactcaattaaagcgtgcgcgtactattgttgacggacaggtagtctgcaataacaagttacataaaatacggctggatgatttgcagcccggtcaaaagtattattatcgtgtctgttcacaagaaatgttgctttatcaggcatataagaaagttttcggaaatactgcccgttctgctttcagtgaatttactctgcctgtaaccggtacggattcttttactgctgttgtgttcaatgatctgcatcagcatacccataccttccgggctttgtgcaggcaaattcaggatattgactatgattttgttgttttcaacggtgactgtgtagacgacccggcaagtcatgatcaggcaactgcctttatcagtgaactgaccgaaggagtgcgcggtgattgtatcccgactttctttatgcgggggaatcacgaaatccggaacgcttattctatcggtttgcgtgaccatttcgattatgtaggtgacaagacttatggctctttcaactggggagatacccgtattgtcatgctggactgtggagaagacaaaacagacgatcattgggtctattatgatttgaatgatttcacccagttacgtaacgaacaggtcggttttctgaagaaagaactggctgccaaagaatttaagaaagcgaaaaaacgtatcctcctgcatcatatccctctttatggtaatgatggaaagaatctttgtactgaactatggactaagctgctggaaaaagctccttttgatatctgtctgaatgctcatactcataagtatgcttatcacccgaaaggtgaattggggaatcattttccggttgttataggtggaggatataagatggagggtgctaccgtgatgattcttgagaagaggaaagaagaactcagagtcagggtgttggatgcaaagggagaaactttgctggatataacggtctgaataatgtatatgatagtttgaatcatagaattgaatttcaccccaaaagtttagtttctaacttttggggtgattctttttatattgataatacctaatagttcctttacctcttttttattttagcttcctcctgagatgacaatgaatgtcaggcccaaaatgaataatataaacatgactcccaaaagtctgtttgtcgctttggagctaccggtaaattctttccagatgaaaacaccccaaagggcagcaatcatcggtgctccttgtccaagtgcataagaaatggctgctcccgcttttcctgcggcaatgtagcttaatgccgtacctaatccccagatgcatcctccgagaattccgaccatgtgtgtacttgcttttccggcaaagtattccttgtaagtgacgggtagaccaacgaacggacgcttcatcacaagtgtattgaagaggaagttgcttaggaagattccgatagcaaagatgaagaatgcagtataaggagttgccattccggttgtcggtgattcaaagttgttcaaatccatggcagcggcgacaaaccggtaaaagaatgacatcagtataccggcaatagcagcaagaataattccctttttgctgttattggttcccgccttttgattcttaccggctgcaataccgttgcaaatgatggcgataacaatcagcacgactcctgtgaatagccagaacggatctcctttgggggagctgaaataattaatgaatactcccaataccaatgccagtcctactcccaatggaaaagctactgccattccggcaatggatactgaggcggaaaggagaatattggaagcattgaaaatagctcctccgataagtgcactggcaatatatgccgcttccacttgttggatgtcttccagaaaacctcttcccgaatctccgaaacttcctagtgtgaataccagaagtagggcgaacagcaagatgccgatggtgtagtcccaataataaagttcataacgccaattcttactggccagtttttgggtatttccccacgatccccagcatatcattgtgataaagcagaagataatagctaaggtgtaactattgactatatacataatgattttttttaagatttcaattctcttttcctgtcacttgtcttataagtgcgttgcgggttgcccgaatattttcttccccttgaatagtgagatattggtgtttaccgctttcagaaggagaaaaaatactttgtccgatactgtctatggtgattgttcccttctcggataaattgaaataattattccccggttctatggcttgtagcacggatgtcaaatcccatgtttctctgtcatatggcatttcctgatatattttatatgatacgcacagaggatgtttataactgccggcaaaatcatttaatatactttgatgaggatatcgaattttgtttcctagttcccatccgctggcaataattggagtaggccattctttgaaagtaatttgggctgcattcagatcattaacaatgttccattcagggaagtcgaattcattaccatagagtcctcccatgacagatagtaattttaccttttgtgctaccaaggcttttccatccagctcgctgtattcatctgcttccgagataagcaaacgggctagatttgtttccgggcctaaggctataaataccacagaatgatcttcttgctctgccagcaatttacgcaacagtttatatccttccagaatatgatcttttaggcttctttttggatgtaatattttattgttgtcaataatagtatccagcgtttggcggagataatgtccgtcgtctgtattcatcccattataagcataacctaaaggtatgtcgtatttgtcgttgaaacgacaataagcgtcaatatattccagtgaataaggattacacttgcttatagtgatacctagcaaatcaatttttccttttttctcataattaagcagcatttgcatggctaaaacatcatcgatatcatttccaacatccgtgtcgagtatgacaggaattgcagaagtagtctctttctgttgtgcacaggaacagaataaagagacggttattagaatgattgctatatatttgaacatatcttgggtttttataagttatttccaatattctcaattgtattgctggttaatgattgttgcgaggaataatttactttataaagtacgcctcctttagcatggagagtctgattttctaaagttgcagttccttctttggtaaatgtgccatttacatcatatcttccggaaatggtttctccaaatttaccattctctagtttgaattgagagtcattcaaactataaatcagtaaataattgtgcatatctaatacgaaacctaaagaagcattatttgtctggaatgtgatttgtgctccagtagtacatattagttgttctaatttgtcttttggctgattatcgttaatattaaatgctgcaaagttctccggttttactttggcaacatctatataagctgccgccaagccttttatgagactacgagtaggaggtgtaaaatctttttcttgtaaatcccatgtataaattccgtggtcaatttggtccggttcggtggtgttgttgataaagaagttactggtagccaaatcgtaaatatcatagcctcctcctaatgcgaaagatgtcaagataagactcggactgtttgcataactacctttgttctcggcaaccagcgcataatttcctgcaattgatgcgtatgccatgacttcatttttgagatgtttaacattatctttataagcatcaacgccaatgaaatcaatgccttgaagatcgaatacatctttggggcgagcattagtagcctctggaaatggattaataccatcaccgtaaattagattgacacgagttactactctgtaagaactgttttttacagcttttcctacagtatttaatgcatttgtgatcattgtccaggccttctctttgcttagaggggtcccatcccgatattttaaatctttttggtcgattctccagcgcattaacgcatcaggttcattatggatctgagctgatataacggggtgcttgtctccattttgagaatcccagtatcggatgtggttaaataaggcggtgatggctttggtttctctctccagtatccattcatcatcaagaatcatggtgtattgataaccataatagttccaaaaatttccttcatcattccggctgagccttttgttatattcttgaagcacatattgaggtatcaggtaggagaatgaatctcctaccatattcgtactgaaccaaagtaattccattttcaaattatacttgttgacgaactgcaagattgagtttacgatactataatcgtacttgttttctttaggctctaccatattccatgaaattggaatttgtacacaatttagtcccagttcctgagctttcttgaagtagttttccacttcattaatagtcatcttgtcacaattgagaagggcatcaaggcgtatttgtgcaccaagaaacggaaaaggtttaccgtcaacagaaacatatgttttgttgttttcagtcactagtttacttacttctatttgagaaagtattggttcgacgtatgtttcattattattgtcagaacaagctgttgcgaataatgaaaagaaaaccagtgcgtaagttagtattatcattcttttatacataattggtctttgttaaattagtagattattggattattgcggggttcctcctcctgtcataggccagcccggattctgatagataggagaagaatccaaatcacctccggatgaagtaaccagaaaatgttctgctgctatcggatcgagatagtgtgccatattccatttatagccgttgtaaacaatgttattggctgtgatgtgataaggagcaagataagtactgaagctacgtggtgaaacattttctccttctttaagaatggagttgccgttagaatctttataccagtcccagccatacatttcctgccataaattcattcctaggatatggtagggtttggtaatcatctggtccattgaacgccatctatgtaagtccatgctacgtaaaccttccgccatcaactcacatcttcgttcacggcggatattataacgtgtggcatcaataatttctccgccggaatatgccccccaatcagtttctgcttcttttgacatatctgtaagcctgattgttttggtatagtcctcatcaatgccggctctgcgacgaatcgctttccagtacttttctgcataggagtcgagtgaaccatgcaattcataataagcttctatatagttgagataggcttcggctgtacggaatatgatagaaccgacaatactttgagtgttatttgtgtatttcccgtcagggtttaatcctttgcgtaaggcatagcctgtattgtacttttctgtaacagaagaggcggttatattgggtccccattcttctactaccccatgatctcctgcctgagtatgcaaatttttctgtcctggctttttgatgaagatgtctgcacgggtatccctgtttttagtgatatgaatgatattattatctccccaataagatgagttttcatctgcccacatcggggatgcataaataggttctccatttttaagaataaaggcgtcaatcatgcttttagtagtgcctactccattgttgccgacacatccgtattgacaaacttcatttgccactcctaatcctgtgttgtagcgcctccataaaagtacttcattgtatttctccatgtcaatatcgcagaacatactgaaataaggattttcaggttccgaagaagtttgtgggaatactcctgtattggcagttaatatattatatttttctgctatgatttgtgccgctttaatagcttcatcaaagaagaactctgattctttttcaatacttccggatttaaatgagtaattagcattataatctttatttgctcccggccatcccggtccattgggtacaaaagctgttcctttaaaattcttcagccatgagccttcgtaaagtgcgacccttgacttgagaaggatagcgcagtctttgcttagccggttcttacctccggaaggagctatgttttgcatcatttctatagctttgtccagatcagataagataaatctggctacttcatttcggggggctcgtttgctgatttctatcagagcttcacgttcattaggataagttttagtaataataggaaagtcgcctaatgattttaatctttcaaaatacatgaaagctctgaagaaatacatttctccgatatagtgtttgatattggtcgtgtttccgacaatggcattgttttcatacgatggaagcacattttcaaagaaataattgcatcggtaaatatcagcgaaataccatgagcctccttcttgtcctactttccagtatccgggtgcatacattacgttaggttgcataccggccatattatctgtgttattgtcaatttcaaaagttccatatccataggtgccatgagtaggtagcacttgatattgatcagtagcaaaagctgcaatattactttctgttgtcagatattcatttggagaaagttgatcaagaggttcttgatttaggaaatcattgcaacttgtcaaaaagagcactccgctcaataaggttgatatcgtaagtcttttcataatatcctgtttttagaatgtgacatttaatccaaaagagaatgttcgggatagtgggtaaacgtttccgtgtccccaactaccgccttcgattgattcggggtcgaagaagtcaataaggctcgtaatggtgaacaagttttcaccggatgcgaatatcctaaggtgctgcattcccattttttgtacgatgttgtgtggcaagctatatcctatctgcagattcttcagacgtagataagatgcatcttgtaaatatttagtttgtgattgctggtttttatcggtgttgaataagggtcttggatagtaggaattcagattcgttcccaatggactggcttcgtcatttcggaaataatcatcgtgtccttttagtgctgtggaaaaccagggcccttgtctaccgtttgcaccccagaagtagtaactaccctgaaaataatctcttttcaatgttccttgccagaacattctgatatcgaatcctttccaatcggcggctaattccagtcctacattatatcggggcgtggagttacctattctttttaaatcaccgtgatcttgtaaggtgcggcttccggcatcaatttttccgtcttcattcagatctttatacataatgtctccggctttccagtcttgtccgagattactttgtccaccgttgattaatcttccgatgtgttcggccatttcctggtcagattgtgcaatgcctatcgtttcatatccccatatttcacccacgtattttccggcataaaatccatctatcagtccggaaggatttgaataacgagtaatcttggtacgactgtcggcaagtgtaaagcgggcactataattcaatccattatttaaccggtctttccacattagttccagttcccatccgaatgttttaagatttgtattattggaactgggaacggctgttccaaggactacaggcaatttctccgaagggccgaccatatcgtcagttttacgaatgtaataatcaaaagagccggttagccgattgttaaacaggccaaagtcaactccggcattccatgtacggattttctcccaggagagattatagctgacgagtgaaggtgcccaggcaatattggctaatgttccgtcaatgatccatgatcctgttcctgtaccgattgtagaataagtcggatataaagaagatgtattttggttacccaaactaccataagaggctctgaccttaaatgtgttgacaactttgctgacaggcaggaagaatttttctctggctatgttccagcctactgatgcggaagggaaaaatccccaacgactgtcactacgaaatcgtgaggaaccgtcatagcgtagatttacttccagaagatatttttccaggtaatcataattcaatctgccgaagaatccggcggtagcccatctgttgtgtccacctgctacattcggagcaactttttggttatttgaatccattccggtagaagtgttgatagtcggttttcccggataaatgactcctagcttctcagcagctatatctttataattattttgttcggcttgaaacccgaaaagaactttcatattatgtgattttgcaaaggtctttgcataatctgtatagagatttacattaaaataatcgctggcataagtgccttcatgtacttgggaatcgttattccatgtattgcccttagtctttccgtcaacacctgtctgatgaacagttaagtaatcccagtgtgaatattgtgtattgtatcgatagcttaaatctccaatcagtcgccaccctttgataggttctaccgttatattcagttgttggtagagccaagtgtttcgttcttgtttttcacctccgttttgcatttggagcacatggtcgtcatatagaataccatttgggtcatagagaggtttggtaggccaacattggcgtccgatttcggcaaaaaaactttcattaagatgtgtcggctgtacatagtcacttctgataaagcgagtattgaatccgactgatactatttttgataattgtgcgttgatttttgcagatgcagtatatctgtttgagtattcatctccgattctgagctctccatcctgacctaaatagttcgctgataaatagtattgtattttgtctgtcccgccagtaacgctgatattgtgctcgtgtgcaaagacattgtctttgaaaaaatagtcataataatcaatattatcatttccttgtgaatatccgtctgcccataacgaaggattattgggcacggggatggtagaatcggtaatcttgccggccatatagtctttgatgcggtttatcctttcttccgagacccagttgtaaggtccccatccggaattggcagctgcatcattatagtataaggagaacgtgtaagagtctaatgaagaaggcatgttgatagggctacttacacgaaaactgttgttgtagttaacttgcgctttaccggcctttcctttcttggtcgttactaagattactccgaatggcgctctggaaccataaatagaagaagctgccgcatctttcagaactgaaatagattctatatcctgcggattaatggaataaatatctccttccataccatctatcaagactagggcacttcctgtagaaccttctccgatagttccgactccacgtacattgatcgattgtttctgattgagacctcctccctgattgctataaatattcaaaccgggaacctgtccttgtaatgcctggactgcattggatacagggattgcttcgaaggctttcgagtcaatgactccgacagaaccggttaaattaatcttcttttgggtaccataacctacaacgatcacttcatccaataaattgtcgtcaactcccagtgttacgtttatcatttttctatcacctactgtaaactggactgttttaaatccgatgtaactgaattcaatagttgaacttggatccgctttcacttggtagtgtccgttaaagtcagtgacggttccggatactatattcccatcttttacttttatggaaactcccagtagaggttctccattattatcttttactgttccggatacataattctgagcatatgtattcattgaacataaaagtaggtagcccagcaggcagataagcttatgacttgagttataagttatcaggtggacagctttctttaagagagtagagtgtcgattagttttcataatccatgaaatttaaaagttgaatgataaggctaattctttttctaacatgaagtgttttacttcatcgagagtaggaatagacggttgggcaccagaacgtgtaacagcgatagctgccgcggcattcgcaaaactcaatgcatctcggtctatttccctttgggcacaaattacagccaatgcaccacagaacgtgtcacctgctgcaatagtatcaatcgcatttactttgtatccgggaagctgaatgatttctttgtcgtttttcatatatacaccttgacttcctaatgtgatcacagcattgcgtgcacctgcctgtaataagcttagagcgatttcttcaagattatttcctgtatattcaattcctgagatgaaggctgcttccagttcattgacgactagtatatcaatggctttcatcagctcctcatcaatcaggcaggcgggtgcgggattaaacaatacctttttacctttttgtttagccagaagagctattcttttaatcgtttcgtaaggaatctcggcttgcataactatgatatctgcttcgtcaattacctttgaaaaatgaataattgaaccgggtaataaagaatagttagctccgggagctactgctatgcagttttcaccactgtcggcaacaaaaatgagtgcagtccctgtgggctgattaacatcatctatgatataatcagtagtgataccttctttcttaaagtgtttttttagaatttctgcatacatatcatttcccaaagaggtaatgaacgttacagatcccccgagtcttgctgctgctacagcctgattggcgcctttccccccgagggattgcatgaaactggcatctccgactgtttcgccaggcgccgggagatggttgacttgtgcaaccatgtcgatgtttgaacttccaataactactactttcatttgaacagatttatgtgtttaacctaggtcttatctcgtttatagcacaacttctcttttataaggaatcgcactctgtgcaccgattcgcgtgactgctatagctgccgccgcattggcaaatttcacagatttagcgagtgaatgcccttcagacaggcagacgctgaatgctccgcaaaatacatctccggcacctgttgtgtcaatcgtctctacttcctttgcgggaatcatggtatattcatctttctcttttacgtaagccccgtctttacctaaagtaatgacaacattctctatacctttctctccgatagcctgagcggcacgatgagcgctttctatattcatcactttgattccggataacatttccgcttcaatgcggttggggagtatggtgtgcacgttcattaagaatgagttgctcaggctggacgcgggagccggattgaggattacctttttcccatatttgcaagcaatagtagctgcatattccactgtgtctatgggaatctcaagttgcatgagaataatatcagcttccttgattttttcttcggctttattgatatcctcaatagaaagcgaacggcttgctcccggtgctacgataatgctattttcaccgaaagaatctacggagataagtgcaactccggacggacttttctggtcggtaaatatatattccgtattaattttctctgatctgtatatttccaatgcttgcaggccgaacaaatcatatccgattttggatatgaaggtgacttcagctcccagtcgggcggctgcaatcgcctgattagctcctttgccaccgggattcatgtagaaggttccgcctagtatggtttctccgggaacaggtagtctgttggctttcacgaccatatcggtattgcaactaccgatgactacaattttgggtctatgaattgatatagtttccatagtattaaaaattaagactatgcaaatgaaagcaataatcatgcatagttttctacattaataattggtttatataatctcaaaaatgatatcttatattggattttccttgtatagaggagagaatatagaggtaatgtgaagcgaatttatataattacaaagagaaaatggagatttgaaaagagtgtttttatcgtctgaaatacgaatcagacaccttactctttaacattcttttgcgctagcacgtgctctgaggacttcagacagtttttctttccgaattttggattccatccacgccgtaaagtcaaagaggcgtaaaagctgactttcatatttattattatataattcatgaatctcaggagacaacttttcccaaaatgcttctctgtcttttttcaggatgggaatatttcttttattcagaaaccataaaatgatacgttctgttttaaaagtctgctctttgggcgaagatagacttcgggtgatggaacgggattcatactggattagctcatgctcctgcacttcataaaagacgatgaggcggaccagacgaatagttctcattaaaggcagatactttatgttatggtctatgatagcgttgctgatatactttttagcagttttatattcttggttaccaatgtgtacgagtgtggtgtaaagcaataattcactttttcgaatagggcctaaccaggcttctttatcataaagtatttcctggtagtctgccataagttgggtacatttcgaaaaatctcctttatccagatagggaaatagttcgtattggaagagaaggcaagttgcatttactttaaattcgagcgaagtgctgtctgatataagctttcttaatttatcaaggaagtaggggatttcgtcatagttgctcacagaccgcaggctaccgagtactccttcgagtacagataaatagtatataggaggatttgaccagaactgctgattctgctcaaataatgagtctagttctttgtatgaatttaaggcagctctgtaatcgcctgctcccatcaggtaattagcctgaaaaagtttatggtttcgtgttaattcaaaattaccttcggagtctgaagaagcggctatataaagttcgttgaccataaggtcattcatatcctgtttttgctttactgttctgatggagccaatatgagataaacgatatttcaataagttgtgtaatgaagattgctctgtgattttccgaatctttttcaaagcttcattttggatgaagtgtttgtgaaaaagctcctgttctgtcatgttgggaaagttcagacggagcagatattccagttccagcttcaaagctatcgtcagaatttcgttgttctcatagaattgtgcttgttctattgtattggatagtatttcgaaacactcttcaaacagagaacgttcataaagcattcgggctttgcacaaattattcagcagatcgtaatagatatctttctttttacgcagggtgagtaacgtatccgtcagcttttcatataagtattgaatggatacttcaaatgagccattgggcttgcgtctgtaaaattcctcttttacagtatttccattcggttgtttactctttatgataatatcataaatcaccagatagtctttttcctccttgtccttgataacctgtagggagaagtgcttcttttctgatttagataacgagtatatcagggatataacggaatctactcttttcatagggaactctttgcattagtattagattgcaatattcgggaatttttatgtaaaaagcaaatctggcattctgtcactttgtgttttctgtagctctttgttgcgtatatttgtgggaagaggccgggcctgttctgaaaattgcagggaattctcatttcctcagatcagaaaaatatattataatgtgattgaatgtttttctgccttgaaaattgaatgtttgatagtctatctgaaaataatactcattttggatggtttttcataagaaaagctataccttcgatgtactttttaataataaagatgaaatgttggatttaaagcaacttacagttgaagtatgccgcatagctaccgaagctgggcattttctgaaagaagagcggaaaaacttccgtcgtgagcgtgttatggaaaaacatgcgcatgattatgtgtcgtatgtggataaagagtctgaagtacggttggtaaaagcgctttctgccttgttgcccgaagcaggatttattacggaagaaggctctgctacttatcaggacgaaccttactgctgggtcattgatccgttggacggaactacgaattatattcatgatgaggctccttattgtgtatgcatcgctctgcgcagtcgtaccgaattgcttttgggagttgtgtatgaagtctgccggaatgaatgtttctatgcctggaaaggaggaaaggctttcatgaatggtgaggaaattcatgtttcggatgtccgggatatcaagaatgcatttgtgtttactgaattaccttataattatgatcagtataaaccgacggctctccatctgattgataacctttatggagccgtgggaggcattcgcatgaacggttcggctgcggctgcaatctgttatatagctaatggtcgttttgatgcatgggccgaagcgtttatcggtaagtgggattattcggcggctgccctgattgtgttggaagcaggcggtcgcgtgactaatttctatggtgacgaccattttatagaaggtcatcatattattgcaaccaatggatacctgcatcctttatttttgaaactcttagcagaagttcctccgttggatatgtaagactgctgcgattgtataaatagctactactatgaaacacacattacttataaaagattggctttattcttttttgtccctttggtttccccgttgctgcgtcgtttgtggcggatcgttggctaaaggagaagagtgtatttgcaccatgtgcaatataaacttgcctcgtaccgattatcatcttcggaaagacaatccggtagaaaaactcttttggggtaagtttcctctggaacgtgccacttcttttttcttttatcgcaaaggaagtgattttcggcaagttctccaccaactcaaatatggaggacaaaaagaaattggtgctattatgggacgatatatggcatccgaattgcaggcttccgacttctttcatggagttgatgtaatcattcccatccctttgcataagaagaaacagcagatacgtggctacaatcaaagtgaatggatatcgcgcgggattatggccgtaacaggtattccggtggataccgaagcaatcatacgccggaagaatacggaaacgcaaacacaaaagtcagctttagaacgttgggagaatgtagatggaatcttcgaattgcatcgttcggagtatttggcaggaaagcatatattaatagtagatgatgtgttgacgactggagcaactaccgtagcgtgcgcttctcggctggcagagattgaaggagtacggattagtgtgttgacgttggctatggcagaatagggtagcttgtcgtcttcccgaagactctctttaatatataaactataatgaatgccaatgcttacattatgttgttgctgttctacaaataagtactttctcttcataaattaattcgtccgcctatgggcaaacgcaacgttgcctataggcaaactttcgtccggctataggcggacgaaagaatgcctatagccggacgaattaattcatgtacccaaagaacttactttattcagatggaaagtttattgttaacctttgaatctttaaagttttatagaccatcaaaagacaagaatgtttttgtgaataaaagaaggggatgagagtttcggttttcggactgaccctctattttcgaagcaggggggagaagagcagaaacaaaaaagaggtctatctttcgatacacctctttttgctcttcctcttggacttgaaccaaggaccctctgattaacagtcagatgctctaaccgactgagctaaggaagaatgttgcaatcaagaatttcagttttgctcttcctcttggacttgaaccaaggaccctctgattaacagtcagatgctctaaccgactgagctaaggaagaatgtttttctcaattgcgatgcaaaagtagtaggtttttttgaaatatgcaatatctttgcaaaaaaaatattgagaatggacaaaataataggattgggcaacgccctgatagacgtacttgcaaccctgaaagacgatacactcttggatgaactggaattacccaagggaagcatgcaactcatcgatgacgctaagttacagcagattaacacaaaattttcacaaatgaaaacgcatctggcaacaggcggatcggcaggaaatgccatacttggactcgcttgtctgggtgccggaacaggttttatcggaaaagtaggaaatgatcattatggcgatttttttcggaaaaatctgcagaaaaataatattgaagacaatttattgacctccgaacagcttccttcgggagtggcatccacttttatttctcaggatggagagcgtacttttggtacttatctgggagcggccgcttctttgaaagctgaagatctgacattggagatgttcaaaggatatgcatacttatttatagaaggataccttgttcaggatcacgaaatgattcttcatgccatcgaactggctaaagaggctggcctgcaaatctgtctcgacatggcaagttataatatcgtggagaatgatctggaatttttctccttattaataaataagtatgtggatatcgtttttgcaaacgaggaagaagcgaaagcatttaccggcgaagaaccggaggaagctctgagagtgatagccaagaaatgcagcattgctattgtgaaagttggagcaaacggatcttatatccgtaaaggtacggaagaaattaaagtgtcggctattcctgtagaaaaagttctggataccaccggcgcaggcgattatttcgctgccggatttctgtatggtctgacgtgcggatactcgctcgaaaaatgtgcaaaaattggttctattctctcgggaaatgttattcaggtgattggaacaacaatctctccggagcgctgggatgaaattaagttaaatattaacaaggttctggcggaataaccaaggtttgagttacttttacgtctcattttaatgaaagatatatgaaaaaattgctgaataggcggatagctcttgttttggtggctgtaatagctactgtagctttctttagttttaagagtggagacgaccgcaatttccagattgccaagaatctggatacatttaatgcgattgtgaaagaactggatatgttctacgtggataccattgatccgaacaagaccattcgcgaaggaatcgacaatatgcttttctcgctggatccttatacagaatattacccggaggaagatcaaagcgaactggaacagatggtgaaaggaagctttggaggtatcggttctcttattacctataatacgaagctgaaacgttccatgattgccgaaccgttcgagggaactccggcggccaaagcgggactgaaggcgggagatatcctgatggaaatagacggaaaagatctccttggaaagaataattcggaagtcagccagatgttgcgcggacaggcgggtacgagctttaaactgaaagtggagcgtcctaatgagaaaggcggacaaaccccgatggagtttactatcgtacgtgaatctattcagacccctgccatcccatatgctaccgtgatggataataaagtgggatatatcagcctgagcacattctccggcaacccttccaaggatttcaaaaaagcattgctggatctgaagaaacagggagctacttctctggtcatcgacctccgtaataacggtggcggtctgttggatgaagcagtggaaatagccaattatttcctgccccgtggaaaagtaatcgtaaccaccaagggaaagacgaaacaggcaagcaacacatacaagactttgcgtgaaccgctggatctggatattccgattgccgtattggtaaacagtggtacggcttctgcttcagaaatcctgtcgggctcattgcaagaccttgatcgtgccgttattgttggtaaccgtacatttggaaagggacttgtacaggttccccgttctttaccttatggaggaatgatgaaagtgactacttccaaatattatatcccaagcggacgttgtgtgcaggcgatcgactataagcaccggaacgaagatggaagtgtgggaacgattcccgacagtctgactaacgtattctatactgctgccggacgtgaagtacgtgacggaggtggtgtaatgcctgatattactgtcaagcaggaaaaactgccgaatatcttgttctatctcgtacgtgataatctgatttttgactatgcgactcaatactgcttgaaacaccctactgtggttgctcctgaaaagtttgtagtgacggatgctgactataatgatttcaaggaattggtgaagaaggccgattttaaatatgaccagcaaagtgagaagattctgaaaacactgaaagaggctgctgaatttgaaggctatatgacagatgctgccgaagagttcaaggcactggaaaagaaattgaatcataatcttgaccgtgacctggattatttctctaaggatataaagagaatgattgctaatgaaattatcaagcgttattatttccagagaggtggcattatcgagcaactgaaggatgatgatgatttgcaggaagcaataaaggtattgaatgatcctgcgaagtataaggaaatgctaagtgcaaaagtacagaaggaagaaaagaagtaacagctatcttcataaatacaaaagcggtggacattgtaaagatgtccaccgcttttgtatatgacgcatataatttaccggttggccagcggaagtgtgaaataaaaggtggtaccttcgttttcttttgagcatacccggatgtgaccacccattttttccaccagcatcttacagagggtgagtcccagtccggtgccttgaacgaagtcgtctactttgccgaaacgctgaaaaatggtagcggctctttcggcaggaataccgatgccggtatctctcacatagaactctacaaaattctctttattgaggaaaccgaaatgaatctctcctcgcgaggtaaactttacagcattgctgagcaggttacttacgatttgtatcgtccggttccagtctgcggaaacaaatgtattggcgtctccgccatccagaatcagttttacgtctgcctgggttttgtgaccatattgctgttctaattgcaggcagatatccagtatcttgaccggctgaatgttgaatttaagagagtcggcttccaggctggataaatcgagaatatcattgaaaagattcagtagcatatcagaatttctttcaatgatttcggcatactgattcttctcgttttcattatttgtgctggatatcagtttggagaatcctacaatcgcattaagcggggtacggatttcgtggctcatgtttgccaggaaagccgattttaaccggtccgcttcttcggctttgatacgggctgcatccagtgctttctctgttttcttaatttcggtgatatcccaggagataccgataatataaggatgttcgttactggatgggacgaggcgcttcatggtagttatcgtgcggatttctccggaagcagccatatattcttcgaaatagtccagtttcccttcttttagcactctgatatcgtcaaggcggaatttctccatatcctccgtccgtttgaagatctcgaaatcatttctgccgatagctttctcgatagggataccggaatagtctgcaaaagtcttgttccagtataagtatctgaaatcatttccggagtctttgacgaatagatatacaggaacattattcactatggcttccatcaatgaattaagccgcataatttcattttgttgttcggcattggtctgttctgtttcccaaagttgcgaaacatcccgacacatacatagcagatattctttgtcgagcagggaaagccagtgttcgtaatgatgcggtacaccgtccatcattaagtcatgcctggcgatggcgctctttccggagcggaaaacttgctccatattcttgcgtatgttcttgtacgcatcttccggaagaatatcttttatgttggattgggtaatgctgtctgctgtagtaccttctacgtgattggttgacggggaggaaaccagttccacgatattggcatcgcggtcgagcacggtaagcatatcgggcagattatctaatatccgattggaatacctgtcgcgaaagcgttcttttctgccggagactgattcggaggaaagctgctctacttttttttcgagattttgtataatttctaacagctccgcttttgttttgttgttgtaatcctccatagaagatgaataataactattttagtgttgtagaaaatgcatttttatgttgcaaatatagaataaaaattcaagaaacgggcgaactcccaagttattataatataaaaaagaaggatagcttttgccctactaatcagaatgttctatctttgcaccaattacattttaaatgatttacaatatgtctacagaattattctctactctgccttataaagtggcagatattacacttgctgatttcggacgcaaggaaatcgatttggcagaaaaagaaatgcccggcctgatggctctacgcgaaaagtatggagaatccaaaccgttaaaaggtgcccgtatcatgggatcattacatatgaccatccagaccgccgtactgattgaaacactggttgcattgggagctgaagtccgctggtgctcttgtaatatatattcaacgcaggatcatgctgctgctgcgattgctgcttccggtgttgcggtatttgcatggaaaggcgagaatcttgccgactactggtggtgcacattgcaggcattgaacttccccggcggaaaaggtccgaatgtgattgtagacgatggtggtgacgctaccatgatgattcatgtcggttatgatgccgagaatgatgctgccgtattggacaaggaagtgcatgcggaggatgaaatcgaactgaatgccattctgaaaaaagtattggctgaggataagactcgctggcatcgtgtggctgaggaaatgcgcggcgtatcggaagagacaacgaccggtgtacaccgtttgtatcagatgcaggaagaaggcaaattgctgttcccggcatttaatgtgaacgattcggttaccaagtctaagtttgataatctctacggatgtcgtgagtcactggctgacggtatcaagagagcgaccgatgtgatgattgccggtaaggtagtggtggtatgtggttacggtgatgtgggcaagggatgttcgcattcaatgcgctcttatggtgcgcgtgtgcttgtgacggaagtcgatccgatttgtgcgttgcaggctgctatggaaggtttcgaagtcgtaacgatggaagatgcctgcaccgaaggtaatatcttcgtgactactacggggaatatcgatatcattcgcattgaccacatggagaaaatgaaagatcaggcgatcgtatgtaacatcggccactttgataatgaaatccaggtggatgcgttgaaacattattcgggcatcaaatgtgtaaacatcaagccgcaggtagaccgctattatttcccggatggtcacagcattcttttgctggctgacggtcgtctggtgaatttgggatgtgcgacaggccatccgtcattcgtgatgagtaactcatttaccaatcagacgctggcccagatcgagttgttcaacaagaaatacgaagtaaatgtataccgcttgccgaagcacctggatgaagaagtggctcgcctgcatctcgaaaagatcggggtgaaactgacgaagctgactccggaacaggccgcttatatcggtgtatcggtagacggaccttataaggctgaacattatagatactaatttaattgacaattgacagttgacaaatgacaatgaacagctatatggaacgagtgatctgccgggctgttattgttgaccatcaattgtcaattgtcaattgtcaattgtcaattttatgaagaagttccttcccgacttaattgctattttagcttttatcatcctttcttttgcttatttttttccggctgatatcgaaagtcgtattctgtttcagcacgatacggtggctggagtgggagccggtcaagaagctcaggaatatcttgaacgtacaggagaacgtacccgctggacaaactctctttttggtggtatgcctacctatcagatgtctccgagttatgattctaccaaaccgctgaagtggatagaaaacatctatcacttgtatcttccatcttatgtggtgctgaccttcatcatgatgctcgggttttatatccttttgcgggcattcgggttgtctgtctggttatctgctttaggggggattatctgggctttctcctcctatttctttattttgatatcggcagggcatatctggaaatttgtcacattggcttatattccgcctacgattgccggtattgtactggcttatcggaagaaatatctgttgggagggattgtgactgctttgtttatcgcgcttcagattcagtcgaaccatattcagatgagctactacttcatgtttgtcatcctgttttttgtaggagcttactttgaagatgcttataagaagaaggagttgccgcattttttcaaggcaagtgccgttctggcattggctgcgatgataggagtgtgtgcgaacctctccaatctataccatacttatgagtatagtaaggagactatgcgcggaaagagtgaactgaaacaggaaggacctgctgccaatcagaccagcagcggactggaccgtaactatataacgaactggagttatggaattggtgaaacgcttactttgctggttccgaatgtaaagggaggggcatcggttcctttatccaagaatgagactgccatggcaaaggcgaatccgatgtatagtaacatctattcgcagctgacacagtattttggcgatcagcccatgacttccggaccggtctatgtgggagcttttgttttatttctgtttatattggggtgctttattgttaaaggaccgctgaaatgggctttactgggagctactatcttctctattctactttcgtggggaaagaattttatgggacttacggacttttttatcgattatgtaccgatgtataacaagttccgtgccgtatcttctatcctagttatagctgaatttacgatacctttattagcggtctttgccttaaaagaagtgctggctaaaccggaaatattaaagttgaaagaaaatcggacaggagtaattatcactttggtattaacagccggtgtttcactgattctggctgttgccccgggagttttcttctctagttatattccggcacaagagatggcagctctgcagcaaggactgcctgccgagtatttatctccgatcattacgaatctggccgaaatgcgcaaggcaatgctgacttcggatgcatggcgcagtttctttattatagtagtaggatgcttcttattattcctttatcagcagaaaaagttgaaggcttcttttactatgacaggtatcgtgcttctgtgtctgattgatatgtggactgtcaataagcgctatttgaatgatgaacaatttgtatcgaagtcaaaccagacaggagcattcgttaaaactcagacggatgagataattcttcaggatacggctttgaattatagggtgttgaatttcgtaggatttcccggtaatactttcaatgaaaataatacctcatattggcataagagtgtgggtggttatcatgcggccaagttgcgtcgttatcaggaaatgatcgatcatcatataactccggaaatgaaggatgcctatcaggaagttgccggcgcaggcggtgcgatggatagtgtggacgcttccaaattccgtgtgctgaatatgctgaatacgaagtactttattttccctgccggacagcaaggacagacggttcctgttgaaaacccttatgcgtatggtaacgcttggtttgtggataaggtgcagtatgtcaataatgcaaatgaagagattgatgcgctgaatgatattcttccaacggaaacagcagtggttgatgcgaaatttaaagatcagttgaagggtgtgacgaaaggttacaaagactccttatctaccattcgtctgaccagctatgaaccgaatcgcctggtatatgaaacttcttctgctaaagatggagtggctgttttctctgagatttattatccgggctggcaggccaagattgacggacagccggtggacattgcccgtgctgactatatcttgcgtgtgatgaatgttcccgcaggccagcatacgattgagatgtggtttgacccgcagagcttgcatgttacggaaagcatagcttatgcgtcactggctttattgctgatcggggtgatgattctgatttggttcagcaagaagaagttaataactccgaaaaaaaaggaggctgagaactcttaaacttttttctgatcttgtactatattgtactctatataccttaagcggctctcttcatcccgaagagagccgcttatgcattcactaaaaaattatgaaaaacaaacgctgttttgctgttaattgattttatattccaaagttaagtggttctttaaacagaagaaaaggaaatcgacaaagggcgaagatttgtctattaaatatagtgatattataataattaaggtggatatcaggactgaaaaaggaaaatatgaacataaacagtcgatatatggatagtcccattttgtcgcaacccattaaatttgtgcctgaatatagagcgattattatgaaaagactattgttcatttttacctttttttgcctccttgccattcatggaggcgcacagaatattctgactctggagaactgccttcgtatagggattgagaacaatctctctttacagggaaaacgaaaagcgatgcagaaaagtaagtatggcatttcggagaatcgggtgaagctgttgccgcaaatcaatggctttgccaactttaatgataatatcgatccgcctgtctcagtaactgacggttcttcctatggagtaccttataatattacccgaacgttgcaatatagtgccaatgccgggatagaattgcagatgccactttataatcagactctctatacttcgatttccatagcagagattgtggatgagatgagccggctttcgtatgaaaaggcacgggaagatttgatcttgcagatcagtaaaatgtactatctgggacaggttactgcggaacagattgcattgataaaagccaatatcacccgattggaagaactgagagatatcacacaggctttctttgataatggaatggcaatggaagttgacttgaagcgggtgaatatcaatctggaaaatctgaaagtacagtatgacaatgcgcaggcgatgatgacgcagcagcttaatatgctgaagtacatcatggattatccggcagaaaaagaaatcggcctgttgccggtcaatacggatagtatcgctacggttgctttgaccgggttgtcggaaaacctctatgagcttcagttgcttcaatcacaggtgcagctggcagagcggcagaaacgattgataagtaatggctatattccttctctcaatctgacgggaaactggaggtttgccgcttatactgatgaggcttatcattggtttcattccggtccgtccaatcattggttccgttcttatggggtgggactgactttgcgtattcctatttttgatggtttggataagaagtataagatccggaaagcaatgatcgatatcgaaaccatgaaactttcacggttggatacacggaagaatctgcaaacacagtatttgaatgctgtaaatgacttgatgaataaccagcggaactttaaaaaacagaaagacaattatctgcttgccgaagaagtgtatacggttactaccgaccgctatcgggaaggaatcacttcaatgactgaagttctgcaggatgaaatgcggatgagcgaggcacagaacaactacattagtgcacattataattatcgggtgaccaacctgatgttactgaaactaaccggacagatctcatccttgttcaaataacagataactaattgaatcattcatatggaaacaatggacaataatacaatctccagtacgcatcaggagaaagctaagaaaatgagaaaattacgccgctggcagattatagtaagtctgtttggagttgctgtgattgtttggggagtaattgaaattgtttttctctttctgggctataagcagacggaaaccagcaatgatgcgcagatagagcaatatgtgtcacctgtcaatctgcgtgcatcgggctatattaataagatttattttacggaacatcagcaggtacgtaaaggtgataccttgctggtgctggacgaccgcgaatataaaatccgggtgatggaagctgaggctgcattgaaggatgcgcaggcaggcgccactgtgataaatgctaccttgcagactacacaaacgactgcatctgtgtatgatgcgtctatagctgaaatagaaatccggctagcaaaactggagaaagaccgtcagcggtatgaaaatttggtcaaacgaaatgcggcgacacctatccagttggaacagattacaacagagtatgaagctacctttaagaagctggaagcaaccaggcgccagcgggaggcggctctttcgggagtgaatgaagtatctcaccgtcgtgagaatacggaagctgccatccagcgtgctacggctgcgcttgaaatggcacggctgaatctttcgtatacggttgtactggctccttgcgatggcaagttaggcagacgttctctggaagaagggcagttcattacagcagggcaatgcattacatatattctgcccgatacacaaaaatggattattgctaattataaagaaacgcagatagagaatctccgcatcgggcaggaggtggctatcacggtagatgctatcagtaagaaagagtttacaggcaaagtgactgctatttccggagcgacaggttctaaatattcgttggtgccgactgacaattctgccggaaactttgtgaaaatacagcagcgtatccctgtccgtattgattttacggatttatcgaaggaagataatgataagctggcggcgggtatgatggtagtagtaaaagctaaactctgatagccatgccttcgtgtcctagaaattatcctttttacaattgggtgcccaaaccgataggtattattattctgctgttctttttcctgccgattctttcggtgggcggggtatactccgtgaacagtaccgagatgatgagcggcttgggtattatttccgagcatattcagtttgccaattttgtgacttccatcggtatggcggcatttgctcccttcttgtatgaactagtttgtatacgacgggagaaactgatgtgtatcgcaggttttgcactgatgtatgtattcagctatgtatgtgccaaaaccgacagtatctttttgctggcactctgcagcctgctgacagggttcctgcgtatggtactgatgatggtcaatctgtttacgctgatcaaatatgcttttggcatggaggcaacgcgtaatattactcccggcatggaaccgaaagacgcgacgggatggaataaactggatatcgaaaaatgtatcagccagccggtagtttatctgttttttatgatcctggggcaaatgggtacggcgctaacggcttggctggctttcgaatacgaatggaaatatgtatattattttatgatgggtattctgctgctgtccattctgatactgttcattacgatgcctaatcatggttttgccggacgtttccctatcaacttccgcaaattcggcaatgtgaccgcattttgcatatcattgacgtgcatcacttatgtgctggtttatggcaaggtgctggattggtatgatgatccatctatttgctgggcaacggcgatcagtatcctttttgccgggatttttctttatatggatgttacccggcggtcttcctactttattttgggggcgttgaggctgcgtaccattcgtatgggggctttgctttatttattgctgatgattatcaattccagcgcaatgtttgtcaatgtgtatgcaggagtcgggatgcacctggataatttgcagaatgcatcgctggcaaactggtgtatggtcggttattttatcggtgccttgatttccattgtattggggtctaaaggggtgcatctgaaatatctttttgctcttggctttttctttctggcattgtcggcaggattcatgtacttcgaagtgcagacagccggactttacgaacgaatgaagtatcccgtaattattcgtaccatcggaatgatgattttatatgcattgacggcagcatatgccaatcagcggatgcctttcaaatatctttcgacctggatttgcatcatgcttaccgtccgtatggtactgggaccgggtatcggaggggctatttattcaaatgtactgcaggagcgccagcaacattatattacccgttatgcacaaaatgttgatctggtaaaccccgaagcttctgcttcgtataccaataccgtgcagggaatgcaatatcagggaaagagtgaaacggaagcgcataacatggctgccatgtccgtcaaggggcggatacaggtgcaggctacgctctctgctgtgaaagaaatggcagggtggactatttatgcaggcgttatttgtatgatttttgtgctcgtagtgccttatcccaaacgaaaattgctaacttagtatcgtttttcaatagtaatttatcagtgagtcagtgttatggatactcagcaggaacgtttattacagcttgaccgcgatctgaaaagcgggaagaatatatgcagttcgggaggtgtgctcagttgttttccatcttctttaaaagaaccttttctgatgcaggggcttggtttgattgtctgccggcaaggtagtttccagttttctcttgataataagtgcgcttctgccaaggcgggtgagaccttgtttattcatgaggaatcttgggttcaagtgcttcaggagaccgaagatgtggaaattcttattcttgcctatcagatagaaccgatacgtgacattatcggcaactccgtggtttccatgtatatgtattcgaaacttactccggaactctcttgtgtatggaataccggcgaggaagatgagattatgaagtatatgtctttgatagacagtgtgctggaaatggaggagagtgtgtttagcctttatgagcagaaactccttctgctggcactgacctatcgtatttgttcggtctataaccgtaaattgattagtgccggacaggaaacgggcgggcggaaaaatgagatatttgtccgtctcatccagttgatagagcaatattatatgcaggaaaggagtgtggaattctatgcggataaactctgtttgtctccgaaatacctttcggctctttccaaaagcatctgtgggtatacggtgcaggaacttgtattcaaggcgattatccgtaagtgtatctctttgttgaagaatacgcaaaaaaatattcaggagatttccaatgaattcggcttccccaatgcttcttattttggcacattcttcaagaagcaaatggggatgtcgccgcagcaatatcgaaggaatctttaatcgatattactctttttctccataagccagatcgcctgcgtcgcccagccccggtacaatataggaatgttcattgatttcaggatcgatggcagcacaccaaatggttgttttgtcttcgggaaatacgctcttgatatgatcgattgcatgttggctggcaatgatcgaagctacgtgaatttcggcgggatggcctttggtaagcatggcctgataactcagttccatactgccgcctgtagccagcatcggatcggtgataatcagcgttttgtcgtcaatacgcggagatgcgatatattctatatgtatatcaaatttcagggtatctttatattttcgataggcggacacaaatgcattttctgctccgtcgaaatagcttaggaagccttggtgaaaaggaaggccggcgcggagaatggtgctgatgacaagctggttgtccggtgtgctgacgggagcaatgcccagtggtgtccggatgttttttactgagtatcggaactctttgctcatttcgtaagccatgatttctccgatccgttcaatgttacggcggaaacgtaggcggtcattctgaacttctacatttctgatttcggatatgtactggtttagaatcgaatttgtttggctaaaatcaattactttcatattatagtttaatcataatttaatctcattttcatcgtattgagaacgttctggcttgcaaagtaaacgataatctttcaaattgcaatattcagtttgcagatattgttaggaatttataaaagagattcaattagggaaaaatttctctaatcccttcttccttttcaaagaaagtattacttttgtacccggatttacaaggaggcacccaaagctcctcatgttcaggtgaaaagagataataaaacgaaataccaattttaattaattcaaaaaaaatggcaaatttagatttaagcaagtacggtatcacaggtgtgaccgagattgtgcacaatccgtcttatgacgttttgttcgctgaagaaacaaaaccaggtttggaaggttttgaaaaaggccaggtaactaacatgggcgctgtaaacgtaatgactggcgtttatacaggacgttctcctaaagataaattcttcgtaaaagacgaaaccagcgaaaatacagtatggtggacttctgaagaatacaaaaacgacaacaaaccagttgacgctaaatgttgggcagctgtgaaagatttggcaactaaagaactttctaacaaaagactgttcgttgttgacgctttctgcggagctaacgaaaactctcgcttgaaactgcgcttcatcatggaagtggcatggcaagctcacttcgtaacaaacatgttcatccgtccgacagctgaagaactggctaacttcggtgaacctgatttcgttatcatgaacgcttctaaagctaaagttgaaaactacaaagaactgggcttgaactcggaaactgcagttgtattcaacttgactgaaaagatccaggttatcctgaatacttggtacggtggtgaaatgaagaaaggtatgttctcttacatgaactacttattgcctttgaacggtatggcttctatgcactgctctgctaacactgataaagaaggcaagagctcagctatcttcttcggtctgtcaggtacaggtaagactactttgtctactgacccgaaacgtttgttgatcggtgatgacgaacacggatgggatgacgaaggtgtattcaacttcgaaggtggttgctacgctaaagttatcaacttggataaagaaagcgaaccggacatctggaatgctatcaaacgcgatgctttgttggaaaactgtacagttaacgctgaaggcgaaatcaacttcgctgacaagtcagtaactgaaaacactcgtgtttcttatcctatctatcacatcgaaaacatcgttaaaccggtgtctaaaggtcctcatgctaaacaagttatcttcttgtcagctgacgcattcggtgtattgcctccggtatctatcctgaacgcagaacaaactaaatattacttcttgtctggttttacagctaaattggctggtacagaacgtggtatcactgaaccgactccgacattctcggcttgtttcggtgctgctttcttgtcactgcacccaactaaatacggtgaagaactggtgaagaagatggaaaaaactggtgctaaggcatacttggttaacactggttggaatggtactggcaaacgtatctctatcaaagatactcgtggtatcatcgacgctatccttgacggttctatcgacaaagctcctactaaggttatgccttacttcgactttgttgttcctacagaacttccgggtgttgatccgaagatccttgacccacgcgacacttacgaatgtgcttgccaatgggaagaaaaagcaaaagatttggctggacgtttcatcaagaacttcgctaaatttacaggtaacgaagctggtaaggctttagttgctgctggtccgaaactctaagccttttaggcaatagatatgtaatgcaaaatgtgggcggttccgaaaggagccgcctttttttgtttatatgaaggtgattttgtatctttgttaatctgaattatgttcgataaaacgctgacaaatacatgattattacttatttgaaactcttttgtacattcgcaaaaatcggcatgtttaccattggcggaggatatgccatgattcccttgatagagcgggaaatagtcaagagaaaatggatgagcaaggaagaatttatggaaatgtttgccttgactcaatcgttgcccggagtttttgcggtaaatatatccattttcgtgggatataaacttcataaggtcagcggaagtctggtttgtgcgttggcgactattctcccttcattcgtcattatgatgttgattgccatgttctttgcccgttttcaggacaatgaggtgatgattcgtatctttaacgggatacgtccggctgtagtggcgctgattttgtttccttgtatatctgcggtcagagctttgcatttgaagtatgtgcaactgatagctcctgtgattgccacagtactgatctggcaattcgggctttctcctatttatgtggtattggcggggatttccggtggattagtgtatactctgtggttgaaaaataagattaaagatataaaggcatgatatatttacagttactttgggtgtatctgaagataggtacgtttggtttcggaggtggttatgcgatgctttcgttgattcagcatgaaattgtagatctccaccattggctgactccccaacaatttacggatgtggtggcaatttcgcagatgactccggggccgattggaattaatagtgctacttatgtgggctatgcagtgacacacagtgtatggggagcggtacttgctaccgtagcggtgtgtctgccctcttttattctcgtattgctcatttcctatttctttgcgaaatgcaaggataataaatacataaaagcagcgatgtccggcttgcttcccatgtcagtggcattgattgcctcggctgccttgttgatgatgaacagggagaattttattgattataaaagtataggaatctttgctggggcattccttatcacctggaaatgggatttgcatcctattctgctgatttgtctggcaggtctggtgggggtgatcttgtattaaaaaaactttttataaagctagggttggctactggatcgtaaagaagttgcttaatatgcatgaactggaaatagaaaaagcccgctaaataaaatccggcgggctttctgcattatctcgggctattgcttatgatttgttcgcgcgtttacgctcgatttcgtccagaatgactttgcgcatacgcattgctttcggagttacctctacgtattcatcttctttgatgtattccaatgcctcttcgagtgagaactgaacaggcggaatcagacgaactttgtcatcagatccggaagcacgcatgttggtaagctttttggattttgtaacgttgataaccagatcgttgtcatgggagtgttctcctactacctggcctgcatatacttcgtcctgcgggaagatgaagaacttaccgcgatcctgcaatttatcgatggcataggcaaaagcagttccgctttccattgcgatcatggagccattggtacggcgttcgatttctcccttgtgcggctgatattctttaaaacggtgtgccatgatagcttcaccggcagaagcggtcagtacgttggtacgaagaccgatgataccacgtgaaggcatgtcgaattcaaggttgatacgttcgcctgtattttccatcttcaccatttcacctttgcggcgggtaaccatatcgatgatcttgcttgaatattcttccggtacgttgattgtcagttcttcgatcggttcgcacttgacgccgtcgatttctttaaagataacctgtggttgacctacttgcagttcgtatccttcacgacgcatagtctcgatcaatacagaaaggtgaagtacgccacggccggaaacaatccatttgccgtcttcctcactctttcttacacggagtgccagattcttatcaagttctttcatcagacggtcgtggatgtggcgtgaagtcacgaacttaccgtcttttccgaaaaacggagagtcattgatggcaaatagcatgctcatcgtcggctcgtcgatagcgattggcggtaatgcttccggattttcgaaatcgcagaccgtatctccgatctcaaaaccctcgatacctaccaatgcacagatatctcctgatgaaacttcgtttgtttttacacgtcccaaaccttcaaatacatgaagctctttaattttagatttgaacatatcgccattacgttttaccagcgtgatgttcattccttctttcaaggtaccgcgatgtacgcgacctacggcaatacgaccggtataagaagaataatccaaagaagtaatcagcatctgcggagtaccttccagttgttcgggagcaggaatattttcaataatacaatccagtagcggggtaatggtatctgtcggcttttgccagtctgtgctcatccagttatttttggcggaaccgtaaataacggggaagtccagttggtcttctgttgcgttgaggctgaacatcaggtcgaaaaccatttcgtaaacttcttcagggcggcagttaggcttatctaccttatttactaccacgattggtttcaaaccgatttccagtgccttctgaagtacgaaacgtgtttggggcatcggaccttcgaaagcgtcgactaacagaatgcagccatctgccatattcaatacgcgttctacttcaccaccgaagtcgctgtgtcccggagtatcaatgatgttaattttagtaccgttgtaattgatggatacatttttagaaaggatcgttataccacgttcacgttccaggtcgttgttatccaggataagttcaccactattttgattgctgcggaatagatttccggccagcaacatcttgtcaaccagcgttgttttcccatggtcaacatgggcaatgattgcaatgtttcgaatattttgcatataatacctattatttggctgcaaaggtacgaaaataggattagaaataaatgcaatagcctcatttttttcttgtaaaacgttgtgagatataaagataatgtctatctttgcacgctcaaaagaataatttactatatcaaaattctaaaaattatgtatttagacgcagctgaaaagcaagaaatctttggaaagtacgggaagtctaactctgatactggctcaactgaagcgcagatagctttgttttcctaccgtatttctcacctgactgagcacatgaagctcaacagaaaagattatagtacagagagagctttaacaatgttggtagctaaacgtcgccgtttgctgaattacctgaaggacaaagatatcacaagatatcgttctattgttaaagaacttggtttgcgtaagtaatctacttgccgcgaaaagattaaaaaccgtttctcacattgagaacggtttttttattggctttcaatgaaggattagtattttatgctgtgcatattgattgcagccggctgtccgttgtatagtgcttcacaactaattgtcaggaatgtagacgagttcgcattattacagcgaatgatggctactccattttcgtcggtggtaactttagggttccaatagattgtacggcggtggtcattgccttgtcctttactgatatccgggtaatagggtgaataaaattcaatgggctgggagtaaccttggatctgtgtgtttcggataccacgtgattggtacttcttttccgggtcccaattgtcgatggtagtgatatagcaaattgcaaattgatttcccggttgattattgggagttgtgttgttcagataacttttgagagctttttcttcaaagggagagagtctggaagtttccatgtgattttttagactttcgtcgctcaggtgataagcgctgtcgtcatcaattccggcacttgctgtcgtgccgtcgcaaatcataacagattttatcgcatcgatatttttatctataaaaagctcccgatcaaatgttgagtaaagaactccatttatgacgcatagtatataatgattcttgtatttcatggttataaatggtggatctcccttccacttagacttcacttgaatattgggatttaatgtggtcattagccaagggaaatagtccatgaattttccttcatcgcgcattcgatccagttccttagggatatcataataagctcttacagattgctcgaaagctagaatttttttgtatttcgtacgtttggctttaatcgttacctgatccaacaaatgagtgtcgtgtcccataattgaatctagataaagagagtcggagagactgctccaccaactgagtccgctaatatcttcccatttaggatgtagctcttcgtaagcgtatttgcgtagttcgggtgtaaagttacggaaaagtgatatgtttgttttccggttcagcttttttcctttacggcgagtttgaatagccgcactcatggaaccattgaaggcatccattggaatgtggaagaaccccaaagagtctgtgaccgtagtacctgctgctgatatcgtatctctccgggcaatgacgcttacagagatatctttttgctctttgtttctcagaaaagatgttacctgcccatgcagagtcagtctcgtttccggcagatagattggtatttctggagtggcactgatggcttggcttatatcatattttctccatccgtgaatcatcaacagattatctaatgccactcttcgtctgggagaattgtttgcgaaataatatccaggttgatgaatgtatcctttcagatctgatgtaagtaaaaggtctgtgtaaattgtctgatcgaaccgttggaagtctgattttgaagcatcccggaccgctacggagaaatgtccttgtattggttgacctgtatggtttttcattgagatatgatactcaattggttcaaaaggatagtataatgcattggtggatgtggctgttaactgtaaagatggagaaggcatcacatagcaaaaacgctcgcataacgttgccccattgctattcattaaagagagttgtatgactcctcccggcaatccctgagtggataacgggagatgatatactgtttgatctttaaaatcaatggtctgatacatgagcggacgtccttgatgtgatatgaataaagccagtgtatctttgagacttgtcgaatttctgagaactttgatgactaatgctttttctttagacgtcacatttagcacatatccttggggtaaagccttcggtagctgaaatgagtattttttatcttgataggtcactacagctttggcttgtttgtctgtaggggtgtatgtaaagcatcccataccgtcgtggagagttgtaaattgtgcaagttctacatcatccggcccataaacagttcctgaaatgcctactgtaccttcttctttacttgtcgcttcgaatgcaacgactgaaggtactccctctactaattgtccaccttccgggaagaatcgaatcatgaaatctttttcttttgaacgcggacgttgcttcatagattcatccattcggtaagtgatgatgctccggttttcgtctacttcgtttctccgttttctatatacagggatcgtacgcgagaaatattgcttttcactgaatgccaacatccacttcgtataggccctaatctcataaaaaccggagaataaggctttggtcagtatgaattgcccttctccttctccatcccgcaactgtatgatttgtcgttcgctagtatttcccagttggtctaatagttctacataaagtggggtactgattgggctaggctggttttgctcggccgttactacgtatgccttataccatatcgtgtctccgatgtagtaactggtgttgtccaagtgcagataggctttctcgcgtggatatgcatcggcgtaggcttgagaacgggcaaagtaagttgcgaatatagaatccgcaacttgctggctatggatttgcacggctatacttgataggaggcagaaaatgatgattatggagcgtattctcattgtattttgagtgatcagtaatttgaaggtaggggaacgtcgagtgttagcataactatacttgttggattctctctttactacttgtgaattgattgtgtgtgttcataagctatatatttataggtttaacaataactacttatgattttacaagaaaagaaaaaataatgataatatgaaaattccgagtttaattagtgttaatctccagactatataatcactttattcattttataggggagtaggtgaaaagagatatattactggagatattttaggattataattgtgttcatctaaagattttgctatttttgcaaccaaattattctaatttatcacctttgctaactaaaaaactttcaatatggatacgagtaagattgttggagagaaaattaaagcgctccgggaagataaatcaataagtatagaggaattggcacagcgttcgggtttggctatcgagcagatcgaacgaattgaaaataacatcgatataccgtctcttgcaccgctgattaaaatagcgcgtgtgctgggggtacgtctgggcactttcctggatgatcaggatgaaatcgggcctgtggtatgccgtaaaaaagaggctaaagatgccatcagcttttccaataatgcgattcattcacgcaagcacatggaataccattcattgtctaaatcgaaagcggatcgtcacatggagccgtttatcattgacgtgatgccgacagaggacagcgactttgtgctttcttcgcatgaaggagaagagtttatcatggttatggaaggagttatggaaatcagctatggtaagaatacctatttgctggaagaaggtgatagtatttactatgactccatcgttcctcatcatgtacatgcttacgaagggcaggctgctaaaatattggctgtagtctacactccgatttaataaaatctgataccaaatattaagaataatcgcatgcaattatttgaacgtactcttgggcaatggctggaacattgggctgaagagactcccgataaggaatatatcgtttattccgaccgtaatcttcgttttacatggagccagctaaaccagcgcgtggatgatatggcgaaaggactgatcgctgttggtgtggaacgtggtactcatgtcggtatttgggcggcgaacgtgcccgattggctgacgttgctgtatgcttgtgccaagattggtgcggtatacgtcacggtgaatacgaattataagcaggccgagcttgagtatctttgccagaattccgatatgcatacactttgtatcgtcaatggcgaaaaggacagcgactttgtgcaaatgacgtatacgatgcttcctgaactgaaaacctgcgaacgcggtcatttgaagagtgaacgctttccgtatatgaagaatgtgatatacgtcggtcaggagaaacatcggggaatgtataatactgcggaaatcttgctgctggggaataatgtggaagatgaccgcctgactgaacttaaaagtaaagtagactgtcatgatgtagtgaatatgcaatatacatcaggaactaccggtttcccgaaaggagtgatgctgactcattataatattgccaacaacggttttctgaccggcgaacacatgaagtttacggcggatgacaaactctgttgttgtgtgccgctattccattgttttggagtggtgttggctacgatgaactgtctgactcatgggtgtacacaggtgatggtagagcggtttgatccgttggtcgtgttggcttccattcataaagaacgctgtacggctctttacggagtgcctacgatgtttattgccgagctgcaccatccgatgttcgacctgtttgatatgtcttgtctgcgtaccggtataatggcaggttcgttgtgtccggttgaactgatgaaacaggtagaagagaagatgtacatgaaggttaccagcgtatatggactgactgaagccgctcccggtatgaccgctacccgcatcgatgattcgtttgatgtacgttgtaatacggtagggcgcgacttcgaatttacggaagtcagagtgattgatcctgaaaccggcgaagaatgtccggtaggcgtacaaggcgaaatgtgcaatcgtggatataatacgatgaaagggtattataagaatccggaagctacggctgaagtgattgataaagataacttcctgcattcgggcgacttaggtattaaagatgaggacggaaattaccggatcacagggcgtatcaaggatatgattattcgtggtggtgaaaatatctatccgcgtgaaatcgaagaattcctttataagcttgatggggtaaaggatgttcaggtagcaggaattccctctaagaaatatggtgaagcagttggtgcttttatcatcttgcaggaaggagttgaaatgcatgagtcggacgttcgtgacttctgtaagaataagatttcccgttataagataccgaaatatgtcttttttgtgaaggagttcccgatgacaggcagcggtaaaattcagaaattcagattgaaagatcttggattgcagttttgtaaggagcaaggaatagaaattatttaaataaagaattaaaaaagaagaatgaagaattagctgcgctgtatgctgcatagcaattcttcattcttctttttttagttcttcgttcttaaatgaaatcgtctcccagttgcatctgggcatcattcacgtatttgcggatagaatgttcttcgtctttacgacagattagcaggacattgtccgattcggctatcagatagccttccaagccatcgatcacggcgagcttccctttgggaagtacgatcatattatcttttccattatagatcaaagaatgactttttaaagtcacattgccttcccggtctctttctgataagtcgtagagtgatccccatgtgcccagatcagaccagccaaaatcgcctaaagatacatatacgttgtccgctttttccatgatgccaaagtcgatggatacattgggacatgcgggaaagttttcttcaataaatgctgtttctttatctgtagcatagatattttttcccggtgccagtttggatgctaattcgggaaggaggatttctgcggctttaatgatggtattgacgttccacatgaataatccggagttccagtagaattcaccgctttctacgaatactttggctaattccagttccggtttctcggtaaatgtctttactttgtagaagccatcaccggttggttcgtcaatttgtatatagccatatccggtctcaggacggttgggcttgatgcctagtgtcagtaacttttcggagtgagaaacgaattccagtcctttaatgattgcggcacggaattcttcttctttcaaaatcagatgatctgagggagcaacgacgatattcgcattcgggtttaaagcgcggatgtgataggcagcccatgcgatgcatggagcggtatttcttcttgcaggttccaataaaatctgtttctcatccaattcgggtagttgttccttcaccagatcggcgtacattgcattggtgacaataagaatattttcggttgggattaccttttgaaagcggtcgaaggtctgttgcaggagtgaacgaccggttccgaagaagtcaagaaattgtttaggtaatgttttgcggctaaacggccagaagcggctgccaataccaccacccataatcacacaataattatccatgtttgtcatgatagtgactctatttttaaatgtttttgctaatgtacggtttattctctaaatacagaagcctttgggacatgttttattattttttgctccttttttttctcaaactattgtggaatcaaaatattgtcgtatctttgcaccgcaattgagaaatcaagcatgcccagatggcggaatcggtagacgcgctggtctcaaacaccagtggattcacttccatcccggttcgaccccgggtctgggtaccacaaagaaagtcaagtattgaataatcaattacttggctttctttgttataaagtgattgttcctaaattattccaccaccccttaaacaaaaacttttctttaaataaatatgtcgtttgcttttgtcggagtataaaatcggagtatttttgggaagaagatcgaattaaagatagcctattatggaaaagagtatttggcaggagatagaaaaactgtatcaagaatttcagaaactcggtatcggtcagtcggtagactatgaaaagtactacctttattctcttattactcattctacagctattgaaggttctacactcactgagatggatactcaacttctctttgatgaaggagtgactgccaaaggaaagccattggtttatcatttgatgaatgaggatttgaagaatgcatacgaacttgctaaagaagaaagtgtgcagggtgttgatattacttcttccttgttacaaaagctaaatgctactcttatgcgtaccactggaagcgtacataatacaataggcggttctttcgattcttccaaaggcgagtttcgtttgtgtggtgttacggctggtgtgggtgcccgttcttatatgagttatcagaaagtgtctgcaaaagtagaagaattatgttctatattgcaagaacggcaaaagttaatgaatacacttcgggaacaatatgaattgagtttcaacgctcatcttaatttagtaactattcatccatgggtggacggtaatggtagagcggctcgtttattaatgaactatattcaattctgctatcgtcttttccctgcaaagatatttaaggaagatagagccgattatatactttctttacagcagtcgcaagatgaggaaaccagtcagcctttcttgaactttatggcaacacaactgaaaaaatccctttctttggagattgaaagggatcatactttccgggaaagaggattcagctttatgttttagttgttaggtttccagtttatccaggttgcctttttccataaccactctaatggtccctgacgatgtgagcgaagccaccaattacagaaaaagtattgtaaaaagaatacgcatacaccaataagaatgcatgctgtaatgcctgtatgcagataaagacctaatccccaattgtaaaacaagaatcctccgatcaaagattgcgatagatagtttgtcagactcatgcggccataaggtgcaaatttatgaaggacatgtttcagttttgtcaggtaataaacgagtataatccctgcaaacatgattccggtaaatgcaatatttgaaagtgatttcagtagaaggacagaaggtacaagtagtgcctccctgcttataaagtcgggaagtatatctatcaaaccataaagagggaaaaatgctgtaacggctatgatgaatactttaagccagatttttatatttttttctgagtagagaaatacattgctgcgtcctatgatcatacctaccataaataatcctgcggtttgggtaacccttccatgtaagagcatccaccccatattagcaacattacccgtccaaatggcagttttgcacatttcgaggaaagaaccttctttctgagcagcattgactaactcccagtatggagcatcaagatcagcattaatcatatagtcgggattgatgagtgcataagttatttgtcccaattcaataggttgaagtagaagaatgactgctatgatcgtgactgttcgggtagagagtcggcagactgcgatcagtacataaccaagcaaggcgtagagtaccaatatttcacccggaaataaagccgaattaatacaagctataaaaagaagtaatactaaccgccaggcaaaccgcccacgaaaatctttccctttaagtttttgtgaattgtcttgaataaaaaaactaaatccaaaaagcaacgcaaagatgcagtatgccttaccggaaaaggtgaaaaatacactatcccaaattatcctatccgtaaatatcagaaagttacaggtctcttccggaaagctattgagactaaaccgttcgataaaatggataagtgtaattcccattacagcgaacccacgtagcacatcagctatttctatacgattattatggggtaatgtgttagataaatgcatactttttagaatttaaagtgttaacgtactttttcagatgcaaatttaacgtagctcttttatagttttggaaaaatactgttcaataaagagcaaaatatgacctttatgtgctttatatgattgataatgctgtttgtcttttatagttagcctgttgataacttcttgaatattaatgtaaataatgaaataaaatgctatgttggtcttattaaatagaaacaacttgtactgaatacatttctaatgaaaggtatacatgctattgttttgtttaatttgtgaggggttagtccaaatttaattttgtagtgtgggttaataaagtataactgttcattgacgatttgataatcagtctgttttactactcttcgaaacatttctattgtacatcgggtgtatttgatagttaataactctttgactgtgctttcttgttcgctgaataattccaatatccatttatacaacatacgaggtagtaaatgtataaatggcatatgagagataatcttacttcttgcaatctgctgatgtccgccgaatggcatttgccaggcaggaaaagcaatgaagatcattccgttaggcgatagatatttttttaagttgcgcagaaattgctccttgttgtcgatatgttctattacatcatgtatgagaataagcgggaaatgtttctgtaaatcttttaataagaagatatcagaagcgatgaaagttcctttttgccttttagtgatgaagaagttttgtgcttgttcaattcgggatgcggcaatatcaattccaatgacatcacaacctagctcggcaaagggaagcagattccctccttcgccacaccctacttccaatactttgtttggcagatttccagtatattctttaatataaggaatataataatttctcgtagtctgagcttgttcctcaaaataacgttcacggtttgtatgtcgtttctgcatctgatttgtctattgtttctaactgttctatagttatgataaactatcagccggaagactgcatggcagaatgatttttttaccaagagaaacgaatgcctacaggaacagagaacgtaaccggatgttcttttcggattgtgcgcaatgaacttccatcgggaatatagtaattgatggttggctctatatagatgctggtgtgaggtgtaaagtggtattgtacacctgtactcgcattgattgaccattgcaaaggtacatctaatgactggtaaccccaattaatggggacactatctgtgacatgagaagtatgcagagttccttttatcgggatttccatttgtaaaccggctgttgagtaaaatgagaattgtttataattcccaaaacggtaggaaatacggagaggaatacctatgtaatggagcttttgggtttcctgaatccgatattcctttcctgtggtgaactctgattttaaataaatatattgtaatccggtttctatactccagtggttattcaactttttgttcaatgctagtccgatagtgatggggctattatggtgttgatgttctataattcttccactgttgtttttggcaattgtcattagcgtaagcgagtctcctaaggttccttcctgattgcgggtgtttaaatagtcataatattcttcccaagtattgacttgctgggggagaccgctttccaaaccgtcagagtgtggtgttgtcatcaacttgtataggttttgtgccagttgtggtccgactgaccctgccaacatcattttccatttccctgttttctttttggggagtgaagtgaattcttggcttgaatatgagaatgtaataattttctctgcatgctcccatgtaaaagatggtttggcaacaggctgtttctctactgagtcttttatttcagaagtggtagataatcctgttgcacttgtgtctaatgctaatcgggggaggtttgctaaagtagtattaaaagggggttcttctttgtagtgagagatatgtccggaagaggtaatgctctcattttcttctttcttatctaatttcactttccgaatgacattgttagaccaatgattatctttagtctcttttcttttccagtatagatagtcgtgtatcgttgggaaaaaaaataaaatcactagtataagaatcagcctgtaatcagaaatcatctttttaagtaagacttttgccctgaataattgagaagaggaggagtggggagctatattcaacagtttacctatttccttgtgagataatccttccaatacagctaacttgaagattttgctgtatccttctggcaatttctctaccatttctgttattttatcataaggaatagaatcagatgatagcggattatcaataggctcctcgtcttcagggatatcagataagggaattgcagagtttgtactcttttggttgagataccttaatgaaatattcttcataattattcccatccagctttccagtttttcgggggtacgtaatgtctcaatcgaagtgaaaatgacaatgaatccgtcgtgtaggagatcttgtgcgatttgtttatcaggtatataatgaaggcatattctcatcatctttttcgaataggttttataaagtagacttaatgcctgctcattcccttttttacataaatctacaagttcttttatatccatgtgcgtgtattattttaatatgatgaatagaaaccgaaaagactgcatgctttttcggtttttaacatcttgttttttgcggatatgaagaaactttttgttgataaattgaacttgaatccataaaactttgacgaactttcaattattatgcaatctttgtgctctatacattttttatttcccgacaaactgctaactttatcatcattattataatgacatgtgaatagtcggttgtaccattatttaaatctcgtttatgggtaaatacaaatttatagaagaaagagtggaaacaatgtcttcgtcggagcttaagatattcttgaatatactgaagagcagatctaaggaattgatgtcaactctggagtcagtaaggggaataaaagatttggaggctgtttgtaaatcaactcagaaactaaacaatcgtgtttctgagtttgacggaggatcttttcttatattagtggttggacccgtgaaatcgggaaaatctactttagtaaatctcatagcacatgctcacgtcagccccactcatttcttggagtgtacggtgcgtccgtccattatttcaaaaggacaggaggaatccattacccgtattttttctgttgctgataaagctagaaaggtagaacagtttgattcggtcattgatagcctgcgcggatttgaaaaactggaaaacatttccgagataagcattgaaaagaaagaattgaatgatgctaatctggaggagtgtgtttcgttagctttggaagaaagcgtgataaatacagatcatacgctggtgacatccataacaacttccggtggggagcttttgaaagataatatatttctggtggatatgcccgggctggatggcgggtatgtgaatttggataatcctatttatgaaacgatctctcaaagggcagatttcgtgatatttgtgcaaagttcaaattctgctatatcgaaggtttccaatcgttttctgaagttgctgcaggagaataatccgaaagttccggtttgtcttctacataatgtgtttgaagcggcttactggcattcggaagaggagaagcaggctgtaattaaggcacaggtagaatttgccgagaatgaaatgggcagacgtaacttccagttgaaggagaatatatatagtttgaacttgggaaaagtggcggatgctgccagctatgagggaatggaggatcttcaggaagaagctgcgaaatttcagagatttgagaaggatttgtatggcaaggtgatctccaatagtactgatatacgtctgagaagcgtaatcggaagaacgctgaatcagttggaaaaactggataatttagtcggagaatcaattggccaacaggaagcaatcgatatagaatatcaggctgcggcaacttcgtttgacgagttactccgtcaggcgagtgaacttagttacgatgggagcgattttagaaaaatggtgcaagtctatatggatgatgatttgaaagagtttactgaaatcgttagggagtattatgattccggatgcaattccgcatttgccggtggagcgaaggggaaagatgcgacacgcagccttgttacaaagtttatgactgattcgtcagcggcgataaaaagtaaattccttgattcccatgaacatagcctggcccggcagtatttgcggaaactctctaacttgaaagatgatgtggcttttatagagaagatgaatacttttctgaagcagaaaggttgtgcaccttttgactcagtgccgcaagtgacggattttccggtggtcgattttgatttgcagggagcttttgatgtgaagaatattaataatccgactgttccgcatatcggaatacccaatccgttcgggacttattcgacaatggaaattcagagttttctgagaaaagcgatggaatgtatcaccggaatcgatcatacgcataccgggaaaacgatcaaaggatatcttcagctgactgtcgggaagagtatatataaggcggctaatgacctttatgatcagtatgtgcctgtacgcaaacaaagtatcattgattttttggaacaacaaaaaacaatgtatctgaatgcgctggtgtctgataaagaagaatttgacaggaaggatgcgttgcttcggtcaataaatgcacaagttcagagttttaaggattcaataagataagaataagccaatgaaacgaaatttattaattatcacactcctgtttttgggctcttttgtgattttattgttgggtaacatcattattattggtgagaaaatagcctccttatcgcaggttgcgtgggcagagtatgctttttacaccttgattctggttgtattttatgccgtcgttatacgtccggtcgttcgggtgcatcgtgctccgcagtttccggctttgtctattgatggggagtggaatactgcacaacttgttgcgtttggacataaactggcggataactgcaattatatacctaaagataagtcctgtcccgagttaagaaaactgcatcagcagagattgcgtgaagatttggaacgttatgcaacgagtaaggaagaactggtgcaaatcataagcgaagagctgaaattgcgcattgaagggggagaactgaaagaaacgtcaggtccgcgtacagaggatatgcattcggtccgtatcatcggcatcaatcgtcgcgttatcgaatgggctaaatctgtttttatgattaccgccatttcgcagaacggaaagctggacacggtgtccgtgctttatatgaattataaaatgatagaggatgtgattgttgcttccggcttccgacctacaaggcaacagttgttccggcagtatgtcaatattctggttacttcattaatgactttcgtcgcatcggaggtctttagagatatgggttcggttgcccccttcggctcattggcagaccagtcttcggatgcagcgtccgatatcgacgtttccgatgctgccgccgatggtgccgatgtggatgtggatttggacgacataggagatacagtttcaggagataccggctttttgagcattctgtctaacgtgaaaattccgggagtagtcatcggttcgatatgcgatggcatcgtgaattcgctgatgactttacgtatcggttacgtgacgcgtaactatctgatagatggaatgaattcgttaaatggaatcaaagctaaaagaaaagccaagcgtgcagccgtgaaagaggcactgaaatctttgcccaaagttgtcgtagtcggtacttctttcgtgggaaagggggctatgaacattattctgaatattattggcgggaagaaagtgaaggaaactaatgaagcgaatgtggctgactaaaaggtcgattctatctccaatctcctcttcccaaaggaggaggcttgaggtgctaccgcccttttagccagcctcccccgtattcatttatcttcttcccggctttatccgaacaactttatagaaattgccacgtttggtatgcacgcaaggcactttattcttttgtaggattcttccgaattcaacaatactgcagacagatacacgaatcttgctgtcatgttgtacttgctccagtatttcgatggcaagaagttgctcatattcctcttcttcctcttttgcagcccggaaatattcatggaataattgctctgcaactggcatgacttgaaattcctgattgttttcagtgatgattttttcgtcttccgtatcgaaccagtatcgttctcctttgtacaaatcatgtatggcttgtgtataaagttgttcataatcaataggagagcaatcaatcggtcctgtcacattgatgacaatatagcgtcggctgccggaagtatcggtcagcaaatctttatgattactggttccgatgaaagaagcgtaccgacgcatctcttgagtagctgtaccgcgtggtcgtcggatgttgacaatcggtttttggagaatatgtttcagaaatgcctgttgatttgccttgttctgatcaaattcgtccatattgataagcaggaaacgattgagagacaactctgcatcccgtttgttactgaaatcaattcggtcggtatagtatgcctgcaattcgggtggaatcagactccggcaaaaagtagattttctgtatgcctgcggaccaacaagcaacggaactgtgcagtttgcatatttccggtctatctgccgccaatgtgccaccatattcaggaaccaacgataaaacaaatcgggccagtgaggattgttgcaaggtatccgggatgccagttcacgtattcggtcgtatccgtcccagtgaatatccaatccgaaaaggaagtcttcgacaggattgaaaaccgggacgcgatccgaatctagatagcggattacatccctgtcccaaagattgagtccttccagtcttgcattcatggcaatgctgttccggatgcggctgcttaaaggacgaaaacagaagcaaaacgtatttcgttcccgatactccgttaccgtcgtcattgtattgtatcggaactcgtaccgtcgctgcataaattcccctgttcggaattccagttcctgctctgctgtcaaggaagatttcttgccgaagcctttttcacttgtatatacattttgtaccgtttgacgaacgaggtattccttcctttgggtatagaaatgagcgattgcccagcgggcggtttcttcttccggtatgcctgcctgaaagcaatacctggctacctgaaccagtaaaggcttcaaatcctcgtcggagcgggtgtgcacgtgcggctgaagttcgcttaatgaccggtatgctttattcagagctgcttcgaagagtgccgagagcgtatcgaaactgtcgtatcccggtatcagccgtttgaatggggatgtttctgcctgtactgtttccttataagtcgtatccgaaggcatttccagtggctggcgcatgtaaacaatggtagaatcggggttgtaataaagttccggatcatacgtttgccgacttgactgttccagtgtaggatttttcagttcaatggggtaggagagtgcaggctgatagaggctgaacgcttttcggtacgcatgtgcctgaaagatctctgcttcttcccgcttctgagggagtgattgatccggacgtgtgaatcttatccatatttttacggaatgcccgctggagcccatgaaggtaaggaaagtttgtgaaagttctgctgcttcctgcttcacccggttcacttctgcccggtttgccagatgatttacttctatttggatgattccgttgtatctggtcatttgtattccattgaccgttttccgaaaagttgctgccgggattactttggctagtttcttggcttcgtccagcctgtagtccggtgatgcataacgtatgctcgtgcgtagattagtaaccggctgggctttcgtttcatgcttcatcgcctctatttgtaggtttatatctaacgtccgcatcgtcgttgccccatctttatcccgcatcaaagtaattttcatgataaatttgttattgtttatgtcgttcttataaaagcttggtaaaggtatgttttattgtttacctctccaaatatataggttatattctttatagaggttgttgtccgctacttctagtgtcatctattaatagtatagtaaagttctactcttcctttagcaaagttcctttcttctaatagataagttgtttttgactaggagtaatctataaatgcaacttgcatttataaaaataaaagctttgattatataaatgaagcttgtatttgtaaaaacaaaacttgcgtttatagtttacttttaataaagaggaagtttgttgttagagaaaaggaagtttgtatctaatagaccggaacttatctactaatgcttttggggacaagtaatataggattagcgtaggatgacacgatgtgaggtgaaagatgaaagatgcggtgaaagatagaaaagggatctttcaccagtcgaaagtacgatgaataagtggattgataggtgttggtgaaagatgaaagattaaaaagaaatttttagatatgtataatattttttgaagtaatgattaggaaaataaaaaatgttggaatagacatgttttttgaagtaatgatcctgctttttgcctgtttaggcacaaaaatgcctttttgtgatttttttctacaacataaatccctacatttgagaatctgtaacgatatagtggatggaaaataaagaaagatatttgtcctagtcccctaaaatcgccaaattttaagattgcgctaggacaaatcttagcagcatggtatatcgttttcgttaaaagtaactgtcgattatcgtgctgcttttttattttattaaataaatggcaaatatatttgcataattcttttttccctttatctttgcagatgatgagtcaaaagtgacttatcttttatttaaatgaaatattagttattgagcgtaagctgattccggttccctgaaatcgccaattttaagaactgccagaatgaagtcaaacgatctctaacttctattattataacctgaatatctaagaatttccttattcttattatatataagtaaaggagatattttgactcttcttataatataacgaagcgtagacgaatttgttcatttgtgcagtaggtgtttggcgatacctggggacggatgacggatttagtctgcgctttttccgttataggacgatttgtctaatcatatttattgggaaaaatgatatgaataacgattaattaatatctctgatagaataatgataaaactaactaatatgaagattattaatatcaggaaaagtctagcattgataatggtggtaactattgcagttcctatgttgactgcaagttgtaaaggtggtaaaggtagagggggagaggttcctgtacgagatacaattcccctaaagcctcaagttaaacaggttgtgctatatttagatgcatctgttagtatgcaaggttatttaacagcttccaaatcaacaaatttcggtgctgtagctaatgcaatagaaggtcttgttcctaataacaagagtacctatttatttaaagataaaccagaaaatatagatgatttatcaactaaaataagggataatcgagtggcgcttgatgcacaagagtcagatttaaggcgaatgatttctattatggccgaaggagcatataagagtgataccacttgctatttccttcttacggatggtatcttaagcggttccaataaacaaatcaataactcccccaatagatcatacaatataacaaatgccacagacttatctcaaggcatatacaatacgctgaaaccttataaaggaaaactgtctggaatggtgttgcaatatgaagcaccatttaacgggcgttattcaaaatacaacaatgacgcggtaacattgtcaaatgtaatgcgtccctattatgtgatagctttaggagcaccacatataatccaacaaatccacaaagatattacggctgaaaaaaggtctgcattggctgggtataaaaatgaatccttgttcggctttgatttcgagatgaattctccacaaatgagagataaccagactggtgtaatattccttgatcagaaatataaaatccaatcaaaagccagtagtgtagttcttgagtatgatgtgtctaaactaccttcaagtctattgtcagatattgattcactcattaagcatacgactataatcacatgcaacgacagagagaaccagcagttgataaatggggaaaactataatatcaaatgtacagataaacttcttacaatacatataaaagacaaaacagatctctgtattcccggaaaactacttattcgattgggttggtggatgccatcttggattgagaaattaacggatcggcaagatactaatccaaaaaactgtcaaacattcaatttagcatatttattaggcccatttagtgtactgaataatggtaaaaatggaggctttttggataatgaggattcaaatataatagaactaacaaataaataataaaatataataacactatggatttatcatctttattttcatgggcgacggatattagtgagctttcatctaattcaccgtatgctcaattctacaaagactactttattgaatcaagtgtttgtggagaggtatttggtataggtgtcgcaattgcaattttggtttcagcagcattctatttcggtataggtaattttgtctatcaactgtcaaaacgtatagtttggggaagtgcactgctaatgacaggtgctgttgtttttttcgtatccgagtcctatatcgtcggagtagatgcaggtgatgtgtcagctagtacagggctgtatttaagtagttatcaaacagaagatagcctgactaaagaactgaagtcggacaaagcaaaacctatacataaaaaggctcaagcataccgggatgaattcagagaaggcattgtaacgcttcctgaagacattgctattattaatatgatatatgcattgttgttttttataggtctttcatttgcctttaaatctcatacaactcatgcgaaagctatcccagtataaaagtataaaataaacaagcgtataaatatgagtaaactatttttatttgcagttggcggtactggtgcaagagttttaaggtcgttcactatgttaattgcctctggtcttcaagggttcgatagttctacagagattgtacccattattattgatcatgaccgccaatgtggagacaaaaaaagggctacggacacattggatacataccaaaatattaatcgggcattgtatcccaacggaaacactgtatcttatgtggatcattttttcatgacacgagtgactcctctttccgaagttggagcagcacatattccaaatcatgttggtgatagtaagtggtgcctaaattttggtccggatggaagtgttaaattcgctgaatttatcggcattcccagtatggtggctatgcctggtttaacagaaacattagggctactacatgcactatatgatagttctgatgataccgcccccgcagcagagttggaattgaatctgaatgtagggttcaagggaaaacctaatattggaaccgttgtatttcatgagttgaaagacactgttgaatttcaacagtttctggcatgttgcgctcccaatgataaggtttttattgtaggatcgctttttgggggaacaggatcttctggaattccagaaattgttaaagcaatacgtaactctggtgctgcttgtgctaacactcaaattggaacagcattaatgcttccatactttgggctgttgccaaatcaacatcctaataatgatgggcttaatactggagcgattgattctgcgatgtttaatgctaaaacaaaggctgctcttggaagctacagtataggaggtggcgatgccttgaataatatggtaaattcaatatactatattggtgacgaagtgaatgccacatctaatgaatataatgagggtgctgtttctcaaaagaatccggcacatgtcgctgaatttattgctgcccaagcaatcgttgatttttgggtttctggaaatgctggtccccatgagtttggaactagagatgatggacaaacaaaggcttttgacttacaggcatttcatgatgtgacacatgaacaaatattgacaagccttagcgtctttactttggcggttaggtattatcgcgaagtggtacgtggagaaagagtcaaattgaatccaacgactacattctattcatcaaaaggttttgatttggctgctaatctgaataaaggtatttatgcattaatcgatgtattcttaggcataccagctaataacgattggggattttatccatggcttaaagaattggccgatcaacctcatgccttgaaactttacaatattggaacagactctttaaatgatattctttgtcataaagtaatcaagggaggtcttattagttctccagtgactaaagatgataacttaaattcgaagatgaacagcataacgaagaacattacctctaaagatgttacaacatttttcaaatcgcttcgtacacttggtcaagaaatttataacataataaaataaaaaagaacatcatgtcatacgtatttagaatacataaccatggggcagttcctgccgaaaaaccaatggacgcaaatggtgttatggattggactcgcacacagtactttgaaggacaattaaataatgctatcgatgtaggtacaatcgttggtaatatagggacctctattccatcgatttttgcacgtgccatgctttttgatttagcttttaaagaaacaggtaggcatgtacacaagatttcctctattaataccaagctgatttcagaatgtcttgatatgctggaattactatatcaacatggttcagatactcatcttgttgtaaagaaatgggtggcagctaatcaaattcacgctttgatacatagcggtgatgaaaaattacaaaagcttggtaatgtcctcaacgacaatcttggctctattggcaatcctaatgaaatatatcttttttattggaaagatattcctacgagtgaaatgacagaacgtgaagttctgataggtgcaagttcacctcttacactggttttcacctctccaaattggattcgtgaaatggttgagtatggatggtcaaacaagttcaagagaacggacaatacaccaatgtttgatgttaatcatcctgaagctcttgaagatagatatgtcgagtttagaaagatgttatttgatttgaggatggcctataatgcagaactcggtagtcaagcaaaaggattatatcaatatattattgattctattgcaaatgctcgtgctgtagttccacccatgactatacttgattacggcaatacgtataaaaacataggacattgcgcagccggtgttatccctatttgttataaagaaattgtgccaaatggtggatatataatgaagctaacgaaagcattttctgctggttttaaagtgcctatggcattgacagatgaaggggttactggtgtgccatatattggtgctagcctttggggacataacaagatagatgatgcatacgttcttagccatgagaaagaggaagaccgggaacttccaggaggtatgggggtgcaatacccttttgtatgtacgcatgatttcttagaagacaaaattttacgattggaagctccccttaaaagggataaatttcttactttaacagcttataacaatggtacacaattaagtcaggagtttcttctaccattgaaacagaaattctttaaatatttcacattggaagaccttaaagatattacaaaaatcacgaccttaggtaatggaagtgttcaagtcacactgaatattccgattgttgatcccaatcatccaacaatcatattcaaaaaagtctatgacaacgagcacatacacaatctcagtcgtagtcagattggcttctatcctttttatcgaacggatactcccgctctaaaccgttatgaagtggtgtcaaccggcagcccaaaactttcattttacactcttaatcaagctgatgaaataaaagttacatctatacagcgttcaaatgctatcgggctaaatattcctacattttattattccattgagcaggcttttgattatgttatagtttcggatggaaatgtacgcggtatgataataccgaaaatgacacaaatagaaatggccaaaaacactaaaacgttcaaatttgcaattgactttggaacctcgaatacgatgattgcatatagtgaaggaactgaccatgcacgagagtttgtggaagatagtagtacctatgtagtctatttacatgagcataacggaacatacattgaaccattaggtcgagaatttatgccaacatcaataaaggataacgataagatagaatttccaatcaaaacggcggtatgtgaagtgacagactatcaaggtagtaataataatgaaatatttggaaaaatcaatgttggtttcgcttttatgagagaagctatactgaaaatggaatcaagctgctatgaatatgacacagatttgaaatggtcattggaaaacaatccagggaaacaagattgtactgcacgtgtccggcatttttgcttaggcttattatggttaattaaaaataaagctattctaggtggaggttctgacaactttagtgtgcgattgacattccccaaatccatgttgaatacagatttgttttatgatagaggagcattagcaactggaacgggaacctggcaatgggctgcccgttctttaggattgaataatatcacttttgacgattccattggcgaatcagaagcaccttactacaagacagtacgtgatatgtgtgatatgttgaacgtggatataggtggtggcactacagatttgttttttgtagtgagaaatcctgttcctggcttttgtaaatttcagtctgtacgttttgctgcaaacgatctctggggggatggttatggtgtcggtgcaactattgggggaaatggttttgtccagtatatccaacaatgtctacatcaggataatagacatgatgtagataatatagttaacacggcaaagtcttcatcagatgttatggctatgttattcaaccgagatgctgatttgctaacatctcaaaaaataaaaggaaacgataatctaagatctgttcttattatccactttactgcactattgtatcatatagcacgtgttgtcaagagccaacgcatacctatcccgaaagacattactttttctggtatgggaagtctatatattaaattgataagtagtcaagattctagattgacaacattcgttcgcgatacacttgaatatcttactgatatgaaggcgcctgtcaattttaatctaatgtttggctcacttgctgatgctaagcagaacacagcattaggagctttagagcatgattgcatcgcagcaacatatgacttgtcgaatttgccaaataatgaagtcaatgagcaggggcttgattctaataaaattctggactatcagtcggtgctttctgataacgataatgttatctatgaacaatcaaaattggtatttgatgattttataacatttttgagttctgacgtattttcccaagccatcaacaacaactttggatttggcatacccaaggcaatgatagatagcttgaaagacttaagttctcaaagtttcataaatgttaaagctctactacctacaaatgcaccaggtgctacagtccgtgacagccttttcttatggcatattaaaggcgcattatatcaattagcagtacagtatcactaaatgtaaaagatgagtatgcaaaatttgaaattcaaaattgttttttttgtaatgttgctgtgtgccaatacattagtttccgctgttaaggcggaaactaatgatagccaatcagatacaattcgcttatccgatgtcgatgctttaaaaggattgccactttatggagaacttattaaaggggaagatattttaacctataaggacgtgtactatgacaaagaattgaatataggtagagatattataggtttatatactttaaatggaaaagatccatttggaagaatcataacggcaaaatggacgattaaaaataaacagatttcattagagagaggggatactatcctctactccatacaaggcggcaagataacgaattttgagaaatgtgaaaatggtaaatctgttaattcaactgttgttggtaaactgtggaatttggtatcttctttatctgttgatagttggattgtgataatgttgataatatttaccgtatgtgttgttgtttacttattctataaaatcaaaagttctattatacaccttaaaaacgatttgaatgaaaatagaagtaatcacggcgtagactctaagttagacaatccaagcgcataccctcaagactatgcaacaaaagagtgtgttgaaacggtgtctaaagcattatctgataaagtcaattctttacacgaagatgttttgaaacttaaagaaatggtaggctcaagaattgcaggaattagtagtatatccaccgagccacataatgaaggcgggcataaaattgaaaccggaatatcgacgccatcccctatcacaccgggaaaagagtccttgctaggttatgctgaaatgacattaggagaaaaacttactataatcaacactaatgatactgctgttttcgaaatatacgaaaggggggatgaatattcatttatcttagttccggattctacgattagagaacagatggttgctcacggtgagatactgggaaagatgcgagataacagaattattgatttcaatgatgctgatttgaatggtgctcgcagtataggctatgataaacctggcactttaataaagactgataaccccaatgaatttttgtctatatctccgttaaaacttaacattataaagtgatggttgtgactattattaaaatcgtatttgcagtagttttttgcctgttattaggatgtgttattatctatttgctatatcgttggaaaccagattctcttaaaaaaatggctgtgctattacatgcgctattgaataatgcaccgtctaattgcaccggttcacataaaggcactgctgacgaaagcatagctgaaactagcgagttgtcgattgatcttaatactagagaagagtttagttgtccgaatagcaagatagatagtcttgttgcaagtataagacaacttgagattttaataaaagaacatgacgctcatctaaacaaacaagtatcaacaatagcggcttccattcagttacttgataaaaaattgtcaggcggaatgttattcgcgatgcaaactgcctcttctaaaatgagagtgccaactgctgctaatgagaggtatccccaaatattctatgcaggaatattggacgaaaacaatattggttttcctttagaaagcctaaccttagatgatgctggtaaatggtttgttattacacaacaaaattccagtaaggcatcatattgtattgtaccctctgaacttatccgagaacaaatgcttgcacgttttgatacttgcattaaacctggatgtgattacggagacagcaaactattttcaccgacaaaaattcaaaatgttgaagacggtaaacttaccttgcaaagtgacttatgggttattacacaaaaagtaaaaataaaaattgtatgagaaacattaataggacaacaatttatctaaaaaatagaaggctattttttaaagtactctcatttgtaatcctgttcttggtatgtacacaattagcaggatgtcatcgaaagcctgcttcacgtgcaattacaggcacaagtggctatgttgatgagataatcgacggtaaaactataaaactaaccaatgaattaaaggttaaccttattggagtaataccatccgaactcacaaaacgttttttggaagataatctgattgatgcggaggtgacacttatagcggattccaatgatcctattcaaaattattctgcaggaacaaaggaatcaataaatgcctatgtaatagttaaggatgatgaattattgaattgtgtgaatggaagaatggtacgtataggcatagctcaaagcgatgcctctgtcacaattgattcagtatttagaccgatggataagaatcaagagaataatatcttgtctcgttcggagctgcttgcaaaactaaatcctgcaacattcacaatcgttacttcgacgggacaagggactggtttctatatcaattctaaaggtgtagctttaactaatgcacacgttcttaatgatgcaaatgaccaagatgcacgagtttactcatttacacgtgatgggaaatatgatgtaaacaattatagaaccatcgagcgcgtcatcttgtttggagatgcctcagaatgtgctacagattttacgatctttgaagtcagcctaaatggttatgaaacatcatttattccattggctactcagaaggagcgagatggcaatcctgtccttaaattaggttgcacattgggcgaacctgctcattttgcggatggactaattagccgtactactgatggaactattactcactctataaatattaatcatggagatagtgggtctcctttaattaatgagcgtgggcaagtcatcggtattaatagaggaggtcgtgttgatcccgatcatggtacagcaacaagcgttaactatgctgtggatatacagataatacgtagttggcttgataatcatccagataataaagaaggtgttttatatggcagatagtgagaactttctaaaatttatcattaagttaattgtcaaagttgttcatattcaaagcaatcttgatgtaaatgctccttttgctaaatggtatcgttttgagaaagtagaacttgatgatgacattatgcgcactataaaagcggaagggctgcgttatggtttaacagaggaacaatgtggcgtatgcattgcccaagctgattcaatcataaatttccagccccaagttcagactatttatgtgtgtgtagatgttgatactattaaaaatgggcaacatgtgcggtttgtttttaataatgactcatttggtatattaaatcttgatgttattaaagatggtaaacacaagttcattgttgtacgatcagatgcggcatctcttatttgggcggatgaaatatatttctccgtaaacaggttaaatataggcttttctccatctttatgcgtgcttcgcaatgggctagcgtttcctggagatacaaattgcacgttggttttggggcggttattgaagatcgaattattctctccaggtataactcatgagattatcgactccgaatcagattttcgttttgtgcaagagtctgatggcgcaaacaaaaagacggcaagaacgtcatcgcctaaaattcaaaatagcgtgattacagaacgacaagttgaaaagtcatccaagagcagtattcaaacatctacaaatatcaaaaactatttgtggctaccatcaagattcaccccaatatcatttgcttttacgaataatgatgctaatatacctacacctgactatccaccatttctagctgtgcgtaaagacataatggataaaaaagcggttttaatcatcaatccttcctttgtgtctcatttgtccaaatccgagaaattaagtgaaagcttgaagtacttagtggatgcgcttgagaatgtatgtgaggttatgcaatcacaggttgttgtagaagctgtaaaaaagattgatatgatagaatctggtatattggaatattcagaaaagaaagaattatggataatgaaaaaaactccaaggatagttatatcttaaactttagacgaaagagatatgaataatgaatcaaatataaaggcgttgatgcagttagtgaaggagtcggtcgaaaataaaagtttgtcaaaagattatggttcactattagatatatgcagaaaatccaatatatcatcctacacgcttaatgttctaattgaaggtgcggtatcaagtgtgaacagcgataaggatcttaagcatgtacaaagtcttccatgttttggatggtcacctgcagtcatacaacaatctgaaactagtgaaaagataattcatgaaggagtgaaaatcaaggtatttagatggggatggaaaacatggatgctttttgtggcattattagtaataacaatattggaattttgtattttgattacagatccgttcattaagtttaaattagatagaatattttgaagtcttatgaaaacaataaataaattattggttttattatcaattataatatccgtagcttgccagtccgattcgcaaagaggaaagtacactttaaattgcataccctatgaggatggtgagaatgatggttatgggctcttaaactccgatggaacttgtttcctctcaaagttgcttaaagattctccaacgcctataataaatgagtattttgcaattgaagaagatggccttttcagtctttgtaaattgcaaaatagttcgtatgaaaaaatagcagactgtggtggtctttccgctattggagtaatgaatgatggtttgatacctgtttgcaaggaaaatgaacacattcgagtcttgaatgctaatggtcggttagagttttctttagatagtattagcgacatagaagtcgctggttgttttagctattcttgtaaaaagttgagggttcttttagttaacggagaattcgtctatttggatcaacaaggtaatcaactttttggacgtacttacagttgggctacggattttgatggtggttatgctgttgtatgtgtagagggggacagttacgctgttattgatatgcagggagaggctattttcacatttgactgtaaaaatcaggataaaatacgctattcttctcaatataaatatctggcgacagcagataaggatgataagattctcatttataattttaagggagaaatcgtgggaatatatccatctaaagttgaaagtgtatatgcttttaaagaagattgcttcatatttgccaatgatgatggatatggtcttatgaactataaagggggcgaactgatacgagccaaatatgatcaacttgtttctaatggaaattattatttggctattcatccagacaatgatgaagaaataaggattatagatgagcacgaaaatgtacttactattcttgatggggaagaaatctatgatttgcacgcattaggctattcttttcctaatattattataagacctgatgatgaaatatatcttatagattcgaaaggcaatgctataggaaagaattctaataatttcgagttggatattgatgacataatatatgctaatcaagtgcctaacctgtattttccacaagatagggttctttcaatagctatgaacctttgtggtcgaggcaatggaatacctattggacaaggagcttattttatcgagaagcaaggtcattgtcatactactgatgtgaaattcataaaaaatagtgttaatccagctcaatttagaggaaagtattccgcttctactatacttgaacaaggagtaaactattctgttgattttggtgttacttttgatgaaccaatatttagacaaggtgctgagaacttgaataattctgcatggctgacagatattactattaccattactctacaagatatattcttatgtgcatctttttttaatgtttgcaaagataggttgattaaattgggatgtacatctctctactcgaacaacaacgaccatattttattgagcaatgatcgtgaaaacgtgcttgttatgaagcataataaacaagcgaatacattcagcatcatagtaaataaggaaaatgaggatgctataaataaatggaaatataatcttaaaaacaataaatagaatgattagtgcattaattagtacagctattagaatattgatagggtggattttaatagataaagtacctctatggcttaacttaagtggtataattgccgtgattgtcaaggtaataggtgtcttaattataataagtgccttattagcttggatataggtttttaactgagctttgttcagatgccctatatgaaatagagcaacactgttagaaatcagtgcctaattcactctctataatagattataagtactcaataaaaattagtttgcattaaaatgagagaatttaatatttgtcccgtttcccatatcagccatgcatctgttgagtgcataccccaatgtatccttactcagataatcctttgggtcaagccattctttcttgagttccctccaaagtgtctctgcaatattcaaatgtggcgaatatggtggcagaaagaagaggaacaatccccttttctgccaataaggtattctctggcggctatctttcgttttatgtattcgcgcattatccaagacgataaaggttgtacgacttattttaaaagaaagctgttcgagaaagttcaagataaattcggtattgatattctcctcagtaacttgccagtaacattggctttgcctgttaataagcccaaagtagttgaatttataagatttctcagagagaaagcaaatgtcttcacccggaaactgccagccataagggacagtacgacctgtagatttgagtaagatggctttggcagcgttgccggaaacagtggctcgtgccttctcggaagccacatttaagttctttgcgttgttcggctgtcaaagccggagtattgactcgtcccataggagggcaaggatacgaataatttaaattaatttataatcactacttagtagggtgcaaattataaaaagtgagtaagcccccgataaagtacccgtataaaaaagaatcgctatagcaaatcgaacaaagctatagtgattctgtatttatattcttgtttttcgttagagtattattagagttctttggagtttcccgattcccagcaatggggtagcagctcttttaggtctttctccttgttggctgcataatacggcaatagtgcaatcacctccgtgagccattcccgggggttaatgttggaggctttgcatgatgccaagagcgaacagattatggcagtgttctgcgcggcttcatggtttccacaaaataagaagttttttcttgataaggctatcggacgaatcgcattttcggccagattattatctattttaagcctgccgtctttcagataattcctcatacgtggccaaagttgatacgcgtaagcgatagcttgccccatccggcttttaggaagcactttcggataggctgtttccatccatttttccagttgctcaagtatgggaagtgcctgttcctgtcttctaagcatgcgttgctcataagtgagttcctcctggtcggcaatctgttcgatccgatagagttgctgtatttgagccagaacatatccggccagggattcattctcttctttggcaacctcgtaatgtcgccttatgtgggcaaggcatccgacaaggcacacctctttcttaccctcaaagatgttgtaggccgcatagccgtcactttgaagatatcctttgaaggtttgtaataatttccaggctgtttcctgtgagcgggaaccgtcatcataatgaaagaagaccaatccatccataaccgccctgactatccacaagtattccttaaccgctttatgattctgtttgttgataaccggtaatgtcgtttcgtccacctggatatagtcggccttcaatacctgtttcttcaactcttcatagagaggtttaagtaattcacaggcaggtttgaaccacccctgaagcgtgttttccgagatcttcaggcctaaatggtgaaactcacgcacctgacgatagaatggtacatgatattcatatttttgcaagaggatttcagtgagcaggctggcaccgggaagtcccttgtagataggcaatagcggaagaggggctataataacactgccctgatgcccctgaggcaaacttatattgtctttcaggccatacttgggacgtatgatctcttttacgtataatttgcccggttcaaattcaagtgtacgtgtgcgttcctcgcctatgcgcttgtatttatccggatcgactccttcgggttctatgacaatctccactacaggaaggccatccaacatgttgcggttctgacgcactttctttttgggagtcgtcgagcagacaggttcttgggctgcggcttcttccggtatttcgtgttccaacggctgaacaggtggatcgaacagtgatagctggttcggatccagatgggctaatttctcgctcttacggccgaataactgacgatttaaccaggctacctgagccagcagttcctgaagcttattttgcagctgttcgttctgccgggtcagacgctcgattgactcagactgggagctattagcctgctggagtgtggccaccaaaagttctaatgtttctgtctgagtcattcgtcatacctgttttgaacaatacaaaaatacagaaaagcaaccgtataatcaaggtttcacctgctgtttttcagtactgcatgtcactttttcgtaacgctttcagacgtttgagccttttggaaggttcgtcgttgattccctctaccatcagaaccaggtcacgccactgcatagggtacgacttgctttctttgtcataagagggaaggcggaaagtgccttcttcaagtcgttttatgtacaaaaccagtccgccatcttccgcgtgtagcagtttcattgtagtgcgctggcggttgataaagataaacacatcacctaaacggacatcatatcccattttatcatgaacaaccccgcataatgagttcatacctttacgcatatctgtcttacccggacagagaaagtagcgcatcgtgtcattcaggcaaaacatggcgattgcagagttgagtgagcaattgcatggccgcctgggattcagccataccactgaagtgggcgataataccaccggggaactctatccggatctcacccgtttgtatagcgccactatcacaggcagagtgggaagcaggtgaagaggtgaggctaaccggtgcaaactcctctaaagaggaagaatgcctatccatatgataacgcctcgataggccaaactttcctttccaatagtaaaagcttgattcggtataggcttcatttatacagaagtcttttatcgtcaaaccgctacgctgttgacgagacaggatttcaatgaattcttctttactcattttttgcatagtcttttttctggcaaagatcgagacttaaagatacaaagacaacgggtactttatcgggggcttacaaaagtgattgttatgaaacgtattttagtgttgggactttttctttgtggaatgaacttgattgcattttcacaaggtggagattattatttgaagcaggccgagagttatcaacgggaagctaagtactattttgacaggctgaacgccatgaacgagatgctgaatattatagtaattaggcacagaaatatctgaaggatgctgaatactatgctcaaagggagatctaagtaggattgaaacttctcagaagtgggcgaaatgccttggataagaccacaacacttatgagacgggtgaagtatgctagagaaaaaggcaaaactatgctaggatagactagagagttttaaaagagagctagaggcaatgtatgatcatattgagtttacgataaaatgctattcctaaaattaaaagaaggttcgtttttaggaggagactattattaacttgagaacccgtttgcaatgaagtatgaaaaagttgaatttatttattctgattgtttggattgtaatatcaaaaagtttctctcaaacaacgtatacagaaaaaggtatggatctcttttatggtagaactgtgcctcaagactatttgaaagcggtgaagaatttcgagaaagcagtaaaacttggtgatggagaaggtgcttactggttaagtcattgctattacttcggactgggagtaccacaagatataaaaaagggtgatgaacttttgtataaggctgcgagtgatggatgtttgaaagctaatataaaaatagctcttcgctttgcgtatgggcgttatgaatatttaggtgatgagaaacaaagaggatgggaactaaacatacagaaagcttgtcaatctgttgagtgggtggctttaaaagataattctgtcgttcaatatattatgagtttgaatgaaaaattatcagaagatgagagagataaatggctacttcgggcagcagatggaggatatccccaagcttgtttcgatatcggattgcattactatggtaagggggactataataagtcatttaaatattttgaaaagaatggattgtgggcttctgcacttttagcgaatcactattattggggactaggagttgataaggatttaataaaagttaaacagtattaccagtgggggcaatgctatggtggtggtactggtttagcgatgaatgatagtctttataattactataatgacgcaataaagagggatgcttcttctttatttcaaaaaggaatgaatggggatgtggagactcaattatttattgcaagatgttttgatgatcgtgaatttacttattataaaataaaaccagatgagaatgaggcttggatgtggtataaaatggccgcaatgaatggtaatgcagaggcacagtatcaattggctagaatatataattgtggttactatggctatcaggtaaagagagattcaatagaatattgtaactggctggataaatcagtccgacaatcgtatgtacctgcattaattcagaaagtgagtgattacctaagtcaagatgtaaaactgtttagtcgtgacattgatgatttgtgttataagatctgtgtaaaggctaactgcatagaagatgttgctaatttaaattttattattgaacgaatgatgaagataaattctcaattatcacttcttctgttgcaaaaaggattagcattaggcgatatatattcaatgctttatttggcaagttgttatgaacgaggtgtaaatattcctatggataaacacaaggcttttgaaatctttaatatggcactggctaaatctattgatacggatgaattctattatagagataaagcgtattatgaattggggcgttgttatcaaaatgggataggcattgaacgaaacatagataaagctatagaatgttatagaaactcgtatttaaatgagagctatgaggagctatgtaaattgaatgtagtttattagttggaatatatttgttggtagtattttaatgaacgttgaactttataagaaggtctgacatgaaacggttatttctattttggattattggattagtgacaatgttgtctgcttatccattgagtcgagattattatttaaagcaggctgaaagttatcaacgtgaagctaagttctattttaatcaggctgaaggctatgaacgcgatgctcagtattataataatcaggcacagaagtatctgaaagatgctgaatattatgcaggaaaaaatgatctggttaaagttgctacttatcaaagatgggctaaggatgctttggataaggcgaagatgcgtatcaggtgggcagatgaggctagagataaaggtaaaactagattagagtgggctagggaagctttaaggaaggcaagtaatgagaattaaatagtccggaatgatgaaaaatatctttttaagtatattatgttgtgtagcgttatttacttcttgtggaggtaatgccaagcaagatgccaagaagactaataaaacagtcattagtcagatagagctaaaagataaaccacgggctattcatgtttaccttttcggtgactttcctgtcgattatggtaaacagatgattaaagaacttcaggaagtgtatccttctgtatattatgcaggacaaatatccttgccggattctgcttattatgcgcctagaaacagatatctggcagctaaattattgaatacaatgatggctttacagcctaataatgatatggttctaggaatgacgacaaaggatatcagtctgaaatacaaagaacatgagaattggggagtgatgggattaagttatttgaataaaagggctgctgtaatatccacttatcggctccgcataccatcaaaacgcgccgagcatttgaggaagttaatgttgcatgagctaggacatgtagaaggtttgccgcattgtaaagtagaaaattgcatcatgcatgatgcggaaggtcagaatcgattttctcagttagatgatttttgttcttcttgtaaagccgtttttaaaggcagaggttggaatatgaattagcaatatattttcaaatctagagaaatagcaagtgtgaaaaagttgtgcccgacacgaatatagggtatcatattatgagtatattagataaattattcaatcgaaaagaaaccagaacacaagatgtagaaccagcttcgatatcttcaagtcaatatagaggacggtggtatggtttgatgtgctgtcttggtgaacaaagtggaagaaatatgtctgaactccttaaaaataagggatcagaagtgttaaccatgctccagttgagcaatgaatttcctgaggactttaagtatgttaatcaacttttagctttggaagatgcaaaaaaaaagcaaggtgagtccctttctgataatgaacgtcagcgtgattatcttttgggagctttagaagctaaggaagtctatctcaatggaaaacattgggaattactattattgaataaacgtgtcgatattgaaaaagcataattgaggacttcatattaccatactagaagtgtttttaagaacttctggtttcttttagaaacatcacaactatactaaaatgtaatattggagctataggtgaatatatgagttagatgaaaaatttagaatattggatactgatttattgtatgctattttctttgtgtttgcgtgcgcagaataaaagagcactgatcatagggcttggagaatatgaagacactaactggtctactattcatggtgataaagatgttcctattattgtggaaatgctgaaacagtataagtatagtgatataaaaacgttgataaaccaacaggctaccaaaaaacaaatagtatctgaatttaagaatctagccaaacggtgtttggctagtgatattatatatattcatttctcagggcatggtcaacggatgacagatttggatggagacgaggaagatggactggatgaagcctggataccatacgatggctatttacaatatggggataaggaccgcggagagaaacacttactagatgatgagataggcatactactaacagatattcgcaatagaattggagactccggacacttgttggtatcagtagatgcttgtcatagcggagattcgtccagagatataaaaaaggagtgcgtaagagggacggaaagagtatttgtgattcctgttgatgtgtctcacgttgttaagaaagaaaaggctccggaatactggctgacgttgagtgcttgtaagagttatcaatctaatactgaattaccaaatggatatggaaaattgagttatagtttatataaatatagagaaatattagccagtttgtctaatgaccaattagtccagcgtataaaactatttatggacgagaatcggagaagtttgccgcaaacccctgtcttgacggggcagttggaatatgagatagcaaatatatttggaggagaaagataatgttgagatttacatcatatacagatgaattttatattcaggaaattcataacggtaataagaaagtaattgatcacttttacgctttttgccgggattattattgtaagacttataagaaattgtttcaggaagaaaatcaggaggccgatttttttcaggaagcttttatcaaactttggaaagagatctgtcgttgttccattttcgtgaaagataatcaaatttacaagatgaatgcgcttggagagataaatccattgaaatgcagtttgcgaacttatctgatggatataactaaaaatgattataaccagtatcttagaaaaaaagaagtaggtttgcagtatatggaacaacttctgaatgataacgtggatgatgctgatagaacgacttatataggggaattgaaatcaaagattgttgcagagtgtgtgaaaagtttgcctgactcttgctacaagattatttcacttttttattacgagcaaaagaattatgatgaaatcatggagatatctgacaattatacaagtaaggatgcattgaaaacacgaaaatataaatgtatggagcaattacagaagcgtattgaagagaggttctgcatgcataacttgaaaccttatatatatgaaagaggaaactctaaataaaatagatcgctacctacgtggggagatgacggatcgtgagaagaatgcctttgagaatatattggcaggagatgatgctttacgccagcgagtagaattgacggaagatataatagatgcagttgaaacacgtgcaatgaaagagcatttggctgcactggatgcggtacggtctaaacgaaacaaggcttataagattggaggggttgtatctgttttggctgcttgtttggtattggctgttttttttcttcgtgtaggagatgatcatttgtctatccctgtgactatcccatctgacttggggatatacgaacggggaggaacacatactcaggacgtcgtgaagttattgaatgatagccaatatgaggaagctttgattttaatagattctttgagaactgtatatagaagtgaggactctctgatactagataaaaagataaagacagaggaggatgtttatgtacatgaatgtgactctattgttctttatcagttagagtggttacgtattcaatcattaatcgggcaaaaaaaatataatgaaatccgtgaatcgttagaacagtatagattacaggaaggtgattatcgcgataaggcggattcattatggatgttacttagataaaagatgataggatgagacgttgggtgacttatatattattcataatggtgactgtcggagtaaatgctcggcagtatactgaaacggagccggactcgacttactactcacgtgctttggagctgatattaaagcgtgattacgaaaaggcgagaagtgtcttgcatcaaggtttgacgtttgctacaggcgagatgtgcataaaaagtatacagaaaataggattgagctggtactttgaaggttgtgttcttaaactgcagaataagaataaagaagcataccaatgttttatagaagcacgtaaatcttttcaggagatttctgataagggagatgagatgtccgtattaaagcaaatggctgagatagaaaaaagattttattcggctgatgaggctatgaaaagatataatgaggtggtgaacattgcccggcagatacctgatacactgatgtggattgatgctttgaaagggcagagtggtgtattgaaagagcttggagagtgggaggaatatgtgcaattgtcacttaggctggattctctaatgtcaaatgttgatgatgtcaatattcagatggaattgaattatgaaagaggagacaatgctcaaaaattgtggggaaatgatgcactggcagaatcattttatttaaagaatttaagtctgattcccaatttgcaggaaggggtaagaaatagccagttatttattaccagtttacgcttgtgcgatctgaagatagcacagaaaaaatatgatgatgcattaaaatataacacccggtgtttgtcttgttatgcttcagagtttgatcttgcgtcagctaatcgttattctccttaccggaaccgtgtatatatttatcagaaaatgggattaaaggatagtgctttttgctgtatggactccttgttcctgagccatcagctgaagtcggtgtctatggaaacggttgccggtcattatgtacagagaggtttattatatgcaaactttgatgaatatgacttggcaatagcagattataaatatgcagacagtttactatctgtccgttatccggaagatagtaatagtagaatgcatattttgctggctatagccaattgttggtatcataaaaaagattttgcagtcgctaaaaagaattattcccattattcagttttgtgtagatctaaatatggagataaaactatagagtatgctaattcactttactatttagccaacattgaaggattcaccaatgaaaagcaagttggatgcaaagattacaggcaggctgctattttattgaaagagcttattaaaaagcaattaagatatatgccaacgaacgccagaactaaatactggaatgatctttctgatatattatggaatatgactgcttatgctgcaaaaataggactaaagcaagagtcttttgtttgcgatgcatataatgcattagtcttttcgaaaggattgttactggaggctgaaaggtctatgaggaatttattacggcagggtggcgcggaagaagacttggcgctgtataataaaatgcttctgttacaaagtcgattggctgaagtagagcgaactataggtaaggggacagagggcgctaatgaactttattctcagattgatcagattgataaacagttggcaagcaggtactctttttatggaaactatactcagttcttaaatacgcaatatgaggatataaaaaatgctttgaaagaaggtgaggttgctattgactttacggattttaaattagattccgttcattgttatgcagcttatgttttaaggaaagaatgggaatatcccttattggtgccgctttttaaccagacccaattagactcattatataatacagtaaataatataacagaccgtctttatcatttcccttattcccaatctctgttgaagttttgttgggcatcactgtctcattatattcacctgggtgagaccgtttattatgttccggctggtactttacatcagctatctcttgaatctgttgctgttgccccggattctatattgggcgatcagtatcattttatacgattgtcttcaaccagagaaatctgcaggcgagaattgcaacatactgaacatacaagtgccgttttgtacggaggattgtattatgatgtcgatttgtctgttatggatgtggaaagtaagaagtatgatatatcccgactttttgcattgcgtagtggagccatggtgagtgattctgtttaccgctatcttcctatgacacaagaggaggtaaatagtattgctgatttgctgggaggctgtcggatagatacgactgtatataccggaactcagggtactgaagaatctttctttcatttggatgggcgggcgcctcaaattattcatttggctacacatggtttttactatactccgacggatgcggagaatgtatcaaggttggcaggatatcagaatgcaatgtcgttgtccggtgtgatcatgtccggtggtaacgcagggtggaagggaactatgctgccggaaggtgttttagatggcattatgactgcagatgatatttcccgtttgaatttgaaaaatgcggatttggtcgttttgtctgcttgtgatacgggactgggcaatatcaaccctgaaggagtttttggactacaacgtgcttttaagaaggccggtgtgcaaactttggtgatgagtttatggggagtgagtgattggactaccaaagaatttatggtgcatttttacagaaatctgatagaaaacggctggaataagagaaaagcttttgaagatgcaaaagcactcatacgccaaacttatcctgaacctttctattgggcaggctttattatgctggactgatactaaaaaatagaaaataatacatttttcttccaaagtagggttactttgaaggactgaaatacattaagtggtaaattaaaaggtttaccattatgaaatcgtatgctactaaaagttctttattaagtgataatgactatatccatggtcttaaaagtctggataacagggtaactcatcaattcttttataaagaatgctattttttattgaatgaaatcaagtattcactttataatggtaaagtcggatatgatgaacttgtgaatgaactatatctggaactcaatgctggaaattggaaaagactggattctttttcgggggtaaatgattgtcatctgaaaacgtggctctctgtcgtgtcatggcattttttctataaaaagaagatggttttgatggagaaggattctgaagaggagttgataagttcctgtaaaaatacgtataatacagaactgaacattgaaatagctatagatgtgaaacgggtaatgtctctgatgaaaaacgaacgttatgcggatattctgaggttaatgatcattgagggatattctcctgaggaagttgcccgaaaatggaataaaactgtggataatatctataatataaaacatcgggctataaaagagtttttaagtatttacaatggtaatataaggatgtataaccgaattaaaatgaattgaacatggacaattggaaccacattgatattgccggagatcaggacaatatctttttatctgctacaatgactggtaatttgcaactgatccgtttggaacatattggttattttcgttataattccaaaagtaagcaatgggaagcagtcttgtgtgacaaacatactctgatgttgaagaggaatacaaattcgcaaaagatactgagttatcatcctcacttggttcaggttagtcagtcattcatcattaatgtgagatatctgatcctgataaaggataataattgtgtattgcttccaccatttgatgaggcagatactttgtagataaccaagccttttatgaaaaaactgaaagaaaaatatccaagtatttaatagtaaggaggaattatgaataataataaggtaatgtatgaagtatggggtgaagatacttttgcccgggagaattatctggtaggtacttttgagactcgggaaaaagccaataaagcgttgaaagccagtgaaaagtctgtattacatcagtgcaaagagttgagagatacctattggatagtggaaatgactcctgaacgggaaaaggagagggaggaatgggaacgtaaacaggaagaacagcgtagaagaaaaagcgattttgactacttccatctttgtgagattatatcccgattgaataccagacttttggagattgtagtacaagatatggaaggaactatagcagagagggaagtaaagctgttggagaagaatgaaaaagttggtgattgttatgactctctttcatttcaatatatcagaggggtgaaagatgaacagtgttgtctggtatttgtggagataggatttaaagatgacggaagaatgtcatcaagctgctttgtagggactcctaatcagattaggagacaattctcttttaagaaaggagaaaagtttgtatgtagaattatagataaaatgattgtggattttttccgataaactaaaaatataaaaataacatgagtacgcaagtttataatttaattattttggatgagagtggatcaatgaacagtattgagaaacaaacagtttcaggttttaatgagacgattcaaacaatttctgctgcgcaaaggaagcatgaagaacaaaggcattttgtttcattgatcatattcaattcagatagtatccgaacagtgtttgataaagcatgtgtagatgtggtgcctgagttaacgcatgaaacctatcgtccgaattgttgtacccctttgtatgatgcaatgggaatagcattgacaaagctacgctattctttacccgaaactaatgattataaggtattagttacaattataacagacggagaagaaaattcctcttcagaatatgatggaaggctgataaagaaaatggttgaggatttgaaaacagaaggttgggtgtttacctatatcggagctaatcaaaatgtagaaaaggtggctgcaacaatctcagtaacaaacgtaatgagttttgaaagtactccttgcggtaccaatcagatgtttgccaaagaaagtactagtcggatgcgtttctttgataaactggcgaagaactgcaataatttggcggacaatttttttgatgatgagaaataatataaagacaaaatgaaaaagataacttttggaaaagctctgggcacaattgcagtattgtgcctgctttgggttagcactatgttgactatcggcttctgtgaacattatgagagtgatgagcaattggctgatatatacagcagcgaatgtcgctcttttatcagtgacgagaaatatagtatacgtaatatgactaccggagaaactacgattgacggtattgactggctgttcgcagcggatgcatatacagactctttagttatttattccaagaacttcaaacgtggatattttgatcgttatacgggagaagatgtgataccggcacaatatacacatgcctggatcttctccgaaggattggcagctgtagtactgaataataaggtcggatttattgatcatcaaggaaagactgtgatcggttttcagtatccttatgctaaggataacaagaagcaagttgggcttgtgtttcacggtggatatagcagtatgtatgatgcaaccggaaaatgtggtatcatcaataaaaaaggggaatgggtattgaaaccgtcttatgagtatattcagaatccacagtatgggaaaagaatattcaatgatggaaaactgtatggagtgctggatgattccttgcaggtgcttgttcccgcagaatatagaagtattgaactattggatgactatttggtggcggacagaccggatggagttcagttgcagatcgcctatgatgggaagatattgaataagaatgtttatcacgatgtgacttcattggattatgatacgatggaaagaacggaagatggcgaaggaacaatcatgaaacctacaggcatctataagtatggcagttataatctatacggattgatggatgaaaaggggaagcctcttactgcacctgtttatcataacattactgtacttagcaaggatttattcttgtgtgctttgaaagacatgtattcaagggtaattgttgacaggaagggacaagttgtccgatatgaagattaattcataaattttatccaaaagaagggaaaagaataaaataaacaagaactaaagttacatcctatccataaaaatgctatatttattgcagctagagagcactttaagtaatgcttaagacagaaaacgaaaagtagtatatatactatatattttctattattaattacttaaacacattttttatggaagccaagaaatcaaaaaaggctgcaattgagaatcaaagaggttcttggttgttgatgggtttggttgttgcgcttgctttcatgttcgtatcgttcgaatggacacagcatgatgtaagagttgcggcagtatcatctgatgatgaatccatctttgtaacggagctcgttccaatcacattccctgaagagaaactggaaccgccccctccaccggaaatcaagcaatccgaatggatcgaaatagtagatgataccgaagaggtgacggataacgtttcagtagtgccggacaatgtgaatgaaccttacaaggttgtttggataccgccggttgtggaaacagaagaagtggtggaagacgttattcacgtaagtgttgaagtcatgcccgaatttcccggtggtgcggcagaattgctgaaatatttgagtactcatatcaaatatccgacaatgtctcaggagatgggctcacaaggacgtgtaattgttcagtttgtcgtagacaaagacggatcgattactaatccgacagttgtacgaggggtagatgcttacctggataaagaagctatccgtgtgataagtggaatgccaaagtggaagcccggagtgcagaacggtaagaaagttcgagtaaaatatactgtacctgtagtattcagactgcagtagttacttgaaataaatgattaaaagggtcggtccaccgcgggagccgacccttttttcaataaaataatatatctttgcgtcacgaacaaaaaaatgaaagactggtttatgaatcttctgtattacctaaaaagaccttttatctggctctcccgtttccgctaccgttgtggatatggtgtgcactctccttttgctttcagtctgatcacggacgtgatttatgagaagatgccttattatgcatacgacctgctgaaggtggaacagaaaaagcgaatcacaacacaggggtgggagaaaggaataccaagaatcaaccgtctgttgttccgcctggtgaataaagtgcaaccggccactatcatagaagtaggaaagccctcggcagcctccttatatttacaatcagccaaaccttctgccgggtatctttttgcttctgacttatcagagctctttttagacgtcgatactccggtagactttctgtatctgaatgactatcggaatccggctttgctggaagaagtttttaacatctgttcccgtcggactacttcgaatagtttgtttgtcgttcatgggatctgctattcaaaggcaatgaaaaatctttggaaacagttacagaatgatgagcgggtgggaatcacttttgacttgtatgatgcaggcttgcttttttttgatacaacaaagattaaacagcattatatcgtcaacttctgatcacctttatacgttaatcttatatatagtaatgatgaaaaatagacgtttatgaaaaaaagccttgtatatacaaagaccggtgacaaaggaactaccagtcttgtcggcggaagccgcgttccgaagacccatattcgtttggaagcatacggaacaattgacgaacttaattcccatctgggatggctgaatacgtatttgctggatgaggcagaccgggattttatcctgagtatacagcataagctattctctatcggttcacatctggcaactgaccaggaaaaaacacaactgaaagctgccagtatccttacttcggaggatgtggaacgcatcgagcgcgagattgataaactggatgaacaactgcccgaactttgtgcctttatcatacccggaggtagccgtggagcggctatttgccatgtgtgccgtacgatttgtcgaagagccgaacgtcgcattctgactctgtccgaaacttgtacaatttctcccgaagtgttagcttttgtcaacagattatcagattatttgtttgttttatcccgaaaaattaattttgatgaacaaaatagtgaaatattctgggataatagttggaaatgatagattttattatacttttgccgaaaaatagaaaataagtattcactttttaatactcaagattatgtattggacattggaattagcatcgaaactggaagatgctccctggccggcgaccaaggacgaattgattgattacgctatgcgttcgggtgctcctcttgaagtgatagagaatctgcaagagatggaagatgaaggcgaaatctatgagagtatcgaagatatttggccggattatcctagtaaagaagatttcttttttaacgaggaagagtattgatttagaaaaagaaaccgaacatataaaaatacccgatagctgtgtgaaagctatcgggtattttttattctcatacaatattaaaagaccggcatctgccagatgaatcctaccgaaatccggttagtactgtaattctcttgtcccagcactttggcacgggaggtgaagtcataagaacgtcctacataggtcacgaagaaatgcaggttggtttccatcggataaaattcgatacctgccagatacccccaggaggtacggtagttacctttttctatcccttcggaggctttggttacggaagccgtttcatacattcctttcacgaaggcattccattttgggaggaaacgatagttacacttggctactacggataaataacctgtatcaaacgcattgtgtccgtccggacgaccgacgatgcttgtgataatccctttacggtcaatctcttcttttgagtacatgaagtcgatgaaggcgttccactttccgagattcagttcatttcctacggcatagtaatacatattatgatctttggcttcgttcatcacagaggccgaccagcgggttttaaatacattattaaagttgccaatccagtttaaggtatagactaacggcatttttccggatttcaaatcaggaaggttaccttccgcattttctgtgattccgtaagtgtcgtcgaaagaactgttgcggctgttcaatatctgcagattaagttgctgatcgggagtaatgttataacttgcattcagaccggtcaggaagttactcatgtaatcgatcatatcacaatattgatagacatcaatcgggttgaggtcgaactcgaagcctccatagttggcactttgtttaccggcaaacaggttgaacttatcgttgagcttgataccgatacctgcccagtcgatggaggtcgggaggttgtctatcatattgtttccgtcgttcgaacggttgagacgctggcggtaacggtaagaaagccagttgttgatatttcctttcgcttcaatgcggagttggtgcatattgaagtcaccttcctgaaatccattctggaaatgagcgtcaaaactcccctgcatattcaggtataagttgaacttatccgttttcttttttacgtctgtcagttcctcgaaaagaggagtgttgggggagaacttttgggcatacattgcctgtatgctacccgcaaggagtagcataaacattaattttttcataagtaggtccggtttttagtattcgttaaagtattcctgaatttgtttccagtccgtggttttggtcagcgcaagcatcaatagtacacgtgacttttgtggattcaattcctgagaggctacaaactgatacttggcgtcatccacttccgcatcaagagtggtaggaccagtcggtacgcgggaagaacgaacaactacaatgccttttctgcgggcgtctatcaatgacggaaatatatttttatgaatattaccgtttccgactcctgcatggatgattcctttgtatccgttgttgagcaacggagtcatcatatcggcttcgatattggaatagctgtatacgatgccgactttgggcaatgaagtcagtttggtgacatcaaatacggattgggtggtatgtttcttcagtgtgatctgattgtagcatactttaccgttcagtacatatcccaatgcaccggagttgggagcctggaaagtctgtacatcaaccgtgttcattttgactacgctttctgcacccagaatcaggccgttcatggcaaccagtacacctttgtcttttgattctttggctgcggcggtaactacggcattataaagattcagcggaccgtcggcacttaatgctgtagacgggcgcatggcacctaccaatacaacaggcttgtcacttttgacagtcagattcagaaagtaagcagtctcttccatcgtatccgttccatgagtaatcacgattccgtcgatatccggtcgtttcaataactcgttgattttcttggcaagtgtcagccagacttcgtcattcatgtcctgtgaaccgattctcgcaatctgttcgccggttacattggcgatatctttgatttcggggactgcatccagcaatgcaccgatagcaacctgtcctgccgtatagctggtgcccgtagccgagcttcctgttccggcaatggttcctccggtagcaaggatgtggatattcggttttgcggcaaatgccattgttgcggataatagtagtgttactactaccaggcctaatttcttaatttgtttcataactgaaatgagtttaggttaataatatattagaatatttgaataaagagcagtcctaacgcaatagcgactacggtagataccagtccgggcatcataaacgaatgattcaacacatatttaccgatttttgttgttccggtgcggtcgaaattaatggcggctacgacagtcgggtaatttgggataaagaaatacccgttcactgcggggaataaggcaatcagcatatacggagaaatacctaatgcgatgcccagcggcatcaatgcccgtaccgtggctgcctggctatataacaggatagacatgacgaacagcgcaataccgaacaaccatggcatctgccgcacgattccttcgatggaaagagtgagctgtgccatattgccctgaaggaaagtatcacccatccacgcaataccgaagatggcgataacagcctgcatcccggcagggaatacagaaccctgcgttgctttgattccatccgtcttggttactataaggatgatagcggctgccgacaacattacgatctcgataatggaggacataccgagcgtgacgatttctccatcgatcaggaaactgggacgcataccttcaaaagatccgaaaaggacgataaaagcagttgccaatataaagatgagtacggaaagcatggcggaacgtttgttcttgacatctttaatctctatcttcttgtcattgaaaagaccttctttcaagcgtttttgatactcgggatcctctatcagttctttgccgactttcatggagaataaagcgccgaccaatactccgatgatagtggcgggaatcgtaattttaagaatatcgaataatgtaatgtcgaaacctgccagtaacccgagcagagctaccgtagcggcagagatgggactggctgtaatagcctgttgcgaagcaatcacagcaataccgagcgggcgttccggacgaatctttgtttcggtagctacctctgcaattacgggcaatacggaataagccacatgcccggttccggcaataaaggtgaacaggtaagtcaccaatgggctgagcagtgtgacgtgtgaaggatttttgcgtagcaaatgttctgccagtttcaccatatagtccagcccgccggctgcttgcatacaggaggcagcggaaatgacggcggcaatcatcaacataacgtcgataggtggtgcggtgggttgtaaaccaaaaacgaacgtgagtattcccaatcctactcctcccatgacaccgagtccgatgcctcccaaacgtgcgccaataataatggctgtcagaacaaatgctaattgtaatatcattggttgttgttttataagttcctaacaaagataaaggatttatcttcgttttttctctgtttctaagataaacaacaaaaaagttattgaatagtttttgcatatttattaaaacaataacatctctggctggttattatatcaactaacgaatgtgttattgttataaaacaaccgatatggaacagaaattatcaaaaaaaactcgtacagagagcgacttgataggtagtcgtgaagtgccggaaagtgcattgtatggagtacagacactccgtggtattgaaaactttcgcatcagcaagtttcatttgaatgagtatcccctgtttattcaggcattggccatcactaaaatgggagctgccgttgccaaccgtgaactggatttattgactgaggaacagacggatgccatactgaaggcttgtaaagaaatactggaaggaaaacatcatgaccaattccctgtagatatgatacagggtggagccggaaccaccaccaatatgaatgccaatgaagtgattgccaaccgtgcactggaactgatgggacatgcacgcggagagtatcactactgctcgcctaacgatcacgtcaatcgttcgcaatctaccaatgatgcgtatcctacagccattcacattggtctgtattatacccatcttaaattggtgaaacactttgcaacactgatcgaggctttccgaaagaaaggagcggagtttgcacacatcatcaagatgggacgtacccaactggaagatgccgtaccgatgacactaggacaaacctttaatggattcgcaagtattttggaacatgaactgaagaatctcgattttgccgcacaggattttctgacggtcaacatgggtgcgacagccatcggaaccggaattaccgccgaaccggaatatgcggaaaagtgcattgctgccctgcgcaagattacaggactggatatcaaactggcagatgacctgataggtgctacttcggatacttcctgcatggtaggatattcttcggccatgcggcgtgtagctgtcaagatgaataagatctgtaatgatctgaggctattggcttccggtcctcgttgcggactgggagaaatcaatttgcctgccatgcagccgggctcttccattatgccgggaaaggtgaatcctgtcattccggaagtcatgaatcaggtctcttataaagtgattggaaacgacctttgtgtagctatgagtggagaggctgcacagatggaactgaatgcgatggaacctgtcatggcacaatgctgttttgaatctgcggacttgttgatgaatggttttgatacattacgtaccttatgtattgatggtattacagccaatgaagaaaaatgccgtcgggatgtacacaacagtatcggagtagtgaccgcactgaatcccgtaattgggtataaacattctaccaagatagcgaaggaagccctggaaacgggcaaaggagtgtatgaactggtgctggaacataacattctttccaaagaagacctggatacgattttaaaaccggagaatatgataaaaccagtgaagctggatattcatccgaatcattgatttatacctgttgaaggaaaaagagagctatatcctaagtgatatcagttctctttttctattaaataattttatatgggaataattgccaattcatccggtaaaatggttattgatagtctgccggaaagggacgacctttgcagtgtcaatgaaagacgttaataagatgatttctaactaactaaagatatttggatatgaatgcatttgatgttattattatcggtttcggcaaaggcgggaagacccttgcggcagagttcgcgaaacgtggacaaaaagtggctgttgtagaacgttctgataaaatgtacggaggtacgtgtatcaatatcggctgtatcccgactaagacactggtacatcaggcgaagatagcttccggcatgaaaggacttacattcctcgaaaagagagaattttaccggaatgctgtttctgtgaaagactcggttacgggtgcgctgcgaaataaaaactatcataatctggctgataaccctcatgtgaccgtttacaccggattcggctcttttgtatcttcggatacggtatctgtccgcactgcggcggaagagttactgttgacagctaagcaaatcattattaatacaggagcggaaacggtcattccatccattgacggcatagcggacaatccttttgtttataccagcacttccattatggaactcacggatcttccgtgtcatcttgtgattgtcggcggtggttatatcggactggaatttgcatccatgtatgcttcctttggctctcaggtgacagtacttgaaagttatccggaattgattgcgcgcgaagaccgtgatattgctgccagcgtcaaggaaacattggagaagaaaggcattgttttccggatgaacgccaaggtgcagtccgtaaaccatacatcagaaaaagcgatcgttgctttcacggacttgcaaacgaacgaggcatttgaattggaggccgatgctgtgctgttggctacaggacgcagaccaaatacgcaaggtcttcatctggaagctgccggagtagaggtggatgcacgtggagccattattgtagatgaatatctgaaaacaacgaatcccgctatccgtgcggtgggtgatgtgaaaggtggtttgcagtttacgtatatctcattggatgactatcggattatcagagatgacttattcggagacgcggagcggaagacaagtgaccgtaatccggtcagctattccgtatttattgacccgcctttggctcgcgtcggtctgaatgaagaggaagcacgcaagcagaatctcgatattatcgtgaagaaattgcccgttatggcgataccgagagctaagactttgggagaaacagacgggctgttaaaggcgattattgacaagaagacaggactgattttgggatgtatgctgtttgcacccgattcaagcgaggtgataaacactgttgcactcgctatgaagacagaacaggactatactttccttcgcgacttcatttttactcatcccagcatgagcgaagcattaaatgatttgtttgcgtagtagcatttttccatatactcgtaaaaaaaataaaataaataaaggaaacaaattgatcatgtctgttttttagtatattcgtgaaaagtagtatatacatacaaagcaaaactaaaagaatacaaattaaaaacagtgattatgaaaaacaaaccttttgagaattttgactttatagacttctgggatgatgatgaatatgctatgaatgaatatattggcgcacctcctacagaaaagatgatagaagaaacagaacgtgaactgggatacaaactccccgaatcttatatttggctgatgaagcagcataacggtggaatacctttcaatgtttgttttccttgcgacgaacctaccagttgggcggacgatcatgtggctatcaccggcattatgggagtcgataaggataagatttattctctttgcggacagctcggcagccgtttcatgattgaagaatgggggtatccggacattggagtggctatctgcgactgtccttctgcgggacatgatatgattttccttgattatcgggagtgtggtccgcagggcgaaccgaaagtcgttcatgtcgatcaggaagatgattattatgttactttccttgccgataactttgaagaatttattcggggacttgtcaacgaagaagtctttgatacgtcggaagaagatgaaagaatggagctggaaaaagttcggaacgcagctttctcaccgctcttgtccgatttgtgcgcaaagtgtgatcatcccgtggatacggagcgatggattcggaagatatcggaagagatagtaaccgataaaggattctttgcgcttcatgccgacgaacgttcttatctgctttacgacatccagttgtggctttacaccaacgtttatcccgatacgacggaagaagattacctgtctgcttataaaaagataatagcgctggacggtgagttcagtacgggaggatatgcttcggactttgttaccgattggctgacacgacgcaaggagagcggtatggttacgtgtaatgacggtattctttcgatggcagcgggaactaaggaggccttgctggcaaatcgggagttgatttcgaacaaagagcaataatttgtgtttatttattataaatatatatctttgtcccgaattataaacacgtagatttatgaaaaagatttttggtgctttaatgattgccgtatgtatcggtatggcgatgcctgcccaggcacaattacattttggtgtaaagggtggtttaaacttgtctaaagcaagcttttctgatgtgaaagaaaactttaaaaaggataattttacaggtttctttatcggtccgatggcggaattcaatattccggttgtgggattaggagtcgatgcgtctttgctttttgctcaaagaggtataaaaatctctgatggaggtgaagaagctactgtcaagcagaatggcttggatattccggtcaatttgaaatataacatcggtctgggaagtctggtaggtctttatgtggctgccggtcctgatttttactttgattttgccggtaataagacaatagacggagtaaaaaccgataaaaagaaagctgaagtcggtatcaatgtcggtgcaggtgtgaagttgctgaatcatctgcaagtaggagctaattataatattccgttgggcaagactgccagctttgaagacattgaaggctcatacaaaaccaagacttggcaagtatccgttgcttatattttctaagccatccgttacattcaatcatacaaagaaagagcttccgataaaggaggctctttttttattcaaggtattttgtttaaggtactggtctgtgaacctgaatctattttatcagattccggtgtgcagactatttttcttatcagtgttccctcttcctcttttaaatccccatttttttattgtacttttgtgcttgcaatgaaaaagtatgtagatgtcatattaccattaccgcttccgaagtactttacctattccctgccggatgaatgtgcggaagaggttgagattggatgccgtgtgatagttcctttcggacggaagaaattttatacagctatcgttcgtaatgttcattattgtgctccgacggagtatgaggtgaaggatatatctgcattgctggatgcttctcctattttattgtccactcaatttaagttttgggagtggctggcggattactatctctgtacacaaggggatgtttataaagcggcacttccttccggcttgaagttggagagtgaaacgattgtagaatataatcccgattttgaggcggatgcaccattatcggaaagagagcagcgtattcttgatttgctttcagtagattctcagcaatgtgtcacgaaactggagaaggagagtggcatgaaaaatatcctcacagtcatcaaatctctgctggataaagaagccatctttgtgaaagaggaattgcgccgtacttacaagccgaaaacggaggcaagagtacgattagccggttctgctgatgaaaagcggcttcatatcttatttgatatcctgtcccgtgctccgaagcagttggcgttgctgatgaaatatgtcgagtgttcgggaatccttggaagagaaacgccgaaagaagtttcgaaaaaagagctgttgcaacgtgcaggggtgtctccttctattctgaatggcttggtggagaaaaagatatttgagatttactttcatgaagtcggccggctgaatcaggaagtgaaggaggtcgtagagttgaatgccttgaacgagtttcagcagcgggcgcacgatgagatcgtgcaatcctttcaggaaaaaaatgtctgcctgcttcatggagttacatccagtgggaagacagaagtatacattcatctgatagaagaaacgattcgtcaagggaaacaagtattgtatctcttgcctgaaatagcattaaccactcaaatcacagagcgcctgcaacgggtattcggttctcgtttggggatttatcattccaagtttccggatgccgagcgggtagagatatggcggaagcaactgggagaaaaaggatatgatatcatccttggagtccgttcttccgtatttcttcctttccgcgatctgggcctggtgattgtagacgaagagcatgagaacacctataagcaacaagaccctgctccccgctatcatgcacggaatgcggctatcgtactggctgccatgtatggagcaaaaacgcttctcggcactgctaccccctccatagaaacatggcagaacgcaaggaacggaaaatatggatttgtacaactgaaagaacgatataaagaaattcagttgccggagattattccggtggatatcaaagagctgcatcgcaagaggcggatggtcggacagttctcgccgttactgatacaatatatgaaagaagcactggaacagaaagaacaagtcattctcttccagaaccgtcgcggatttgcaccgatgatagaatgccgtacttgcggctgggtgccgaaatgtaagaactgcgatgtgagtctgacttatcataaaggtatcaaccaactgacctgccactattgcggctatacctatcaactgccgaagtcctgtcccgcctgtgaaggaacagaactggtcaatcgtggctttggtacggaaaagattgaagatgatatcaaagtccttttcccggaagcggctgttgcccgaatggatttagacactacccgtacccgcgctgcctacgagaagattatcgccgattttgaacagggaaagacggatatactgatcggtacgcaaatggtatcgaaaggtctggactttgatcatgtaagtatagtgggcatcttgaatgcggacaccatgctcaattatccggatttccgttcttacgaacgtgctttccaactgatggcgcaagtagcaggacgagccgggcgtaagaataaacgcgggcgggtggtactgcaaacgaaaagcattgatcaccccattatccatcaggttatcggtaataactatgaagaaatggtagacggtcaactcgctgaacgacaaatgtttcattatcccccttactatcggttggtgtatgtctatctgaaaaaccataatgaagcattgctggaccagatggctgcggtcatggcagagaaattaagaaccgtgttcggaaaccgggtattgggaccggacaaacctcccgttgctcgtatccagacattattcatcaaaaagatagtgctgaagatcgaacagaatgccccgatgggacgtgcgcgggaattgctacaacgtatccagaaagatatgctggaggatgaacgctataaatccttgattgtctattatgatgtagaccccatgtagcactcgatacagacctaatatttttcttataataacctttataaattaactaaccatgaaacgacttacgatttattgcttaacatgtcttattggtgtgagtcctctttttgcccagcaaggagtgactcagtgtggaacccctacggggcaaccgaaatttccaatagaaacttatcaggaactgcccgacccttcctccccctctgataaagactgggcagcagttaccaaccctcagatttcctggggaactattgacacccgctatgcgaagcatcggcttcctcagctgaaaaaacagcagcttaccactttaaaaggctggcgtggcgaacgtgtaaatgcgcaggctgttgtctggaccggcactgaggtgaaagatctgaacttcagctttaccgattttaaagataaaaaaggaaatagcctttcggatgaggcgtttaaagccggtttcatccgttatgtaatgaccgatgaactgaataaagatggcagaggcgcatgcggtcaccgtcaagcagtggattacgattcgttgttggtagccgacccgattgatacgaacttgaaatcaatgtctgttccggcacgtactgttcaacctatctgggtgcaatgctggattcctcaatcggctactcccggaacctacaagggtgccttgctgataaaagacggttcccgtctgttgcagcagcttaatctcgaaatccttgtttcttcccgtgagcttcctgcaccgtccgaatgggcttatcatctggatttgtggcagagtccgtttgccgtagcccgttattatcaggttcccttgtggagtcaggagcatctggatgctatgcgcccgctgatgaaaatgctggcggatgccggtcaaaagattatcacagccactttgacacataaaccttggaacggtcagactgaagattatttcgagacaatggtaacatggatgaaacgtgccgacggcacttgggctttcgactatacggtttttgatcgctgggtagagtttatgatgagtgtcggtatcaatcagcagattaactgttattctatggttccctgggaattatctttccagtattttgatcaggcaacaaattcattgaaatttgtgaggacagcaccgggagaacctgcttatgaagaaatgtgggttgcgatgcttacttctttttccaagcatctgagagaaaagggatggtttgatatttgtgcgattgcgatggatgagcgtccgatggatgtcatgcagaaaacgttgaaagtaatccgcaaggcagatccggagtttaaagtttcactggccggtaattatcatgctgagatagagccggacttgtacgattattgcattgttatcggacagaacttcccggaagaagtacgtctccgccgtgcggccgagaataaacgtaccacctattatacttgttgtacggaagcacatcccaatacattcactttctccgatcctgctgaggctgcatggatgagtttctattcttcgaagaagcatctggacggctatctgcgttgggcatacaatagctggcctttggagccgttgctcgattcacgtttccgcacgtgggcggctggagatacttatcttgtgtatccgggagcccgtagctgtatccgtttcgaacgtctgatcgaaggtattcaggcacatgagaaaataacgattcttcgtcaggaatttgagaagaagggaaataaagccggattaaagaagatagagaaaatgctggctccgttcaaattgggtgatatgccggaaataccagcagccgttaccgtaaaccgggccaatcagatacttaattcgttttgataatagaaacgaatgaagcctgtcaattattaaacgtaaattatgaagaaaatattatttgtctgcctcggaaatatctgccgtagctctacggcggaaggagtaatgcttcacctgatcaaagaagccggactggaaaaagaatttgtgattgattccgccggaatcctgtcttatcatcaaggcgaattgccggatagccggatgcgtgcacacgctgcccgtcggggctatcaactggttcatcgctcccgtccggtgcggacagaggacttttataattttgatttgattattggcatggacgaccgtaacatagatgatctgaaagaaaaagctccttctacggaagagtggaaaaagattcatcgtatgacggagtactgtacccgcattcccgccgaccatgtccccgacccctactatggaggggccgaaggatttgaatatgtgctggatgtactcgaagacgcttgcgctggtctgcttacttctttaactcaggataactgatccgtgtgtgataagcgatcttcagtttttctttgaataccgtcttgatggtcgcaatgtccttgaaagtgatagggcattctttgaaataaccttcagcaacttgggagtctataattttgtcgaccaggttgctgatagtttcttccgtatattccggcagactgcgtgacgctgcttcaacagcatccgccatcatcagaatagctgtctcctttgagaaaggattaggacccggataggtgaacagttcttcattcggttcctcgtcggggtgctcgttcttccatgagatatagaagaacttcgttttcccccgtccatgatgggtgctgataaagtctttgattactttcggcagattatgcttgtccgccagttttaatccgtctgtcacgtgactgatcacgacctgggcactttgctcgtaattcagattcttatgaggattgacgcctcctgactgattttccgtaaagaaagcgggattctccatcttaccgatatcatgatacaaagctccggtacgtactaattgacttttcgctccgatacggatcgctgcctctgccgccagattggctacctgcatagagtgctggaaagttccgggcactgtttcggacatctgccggagaagatcactgttgatattggaaagttcgaccaaagtcacattagaggtaaagccgaacgtcttttccagcaggaacagtaacggataagtaaacagcagcagaataccattaataatgaaataggtatacatccgtgcattcaacttcgagaagtcattggcaagtccgttctcggtcattagctcgaatgcgaagtaaatagccgcataagtcagtatcaccaacaaggccgtgcggaagagttgtgacctctgtgaaagctcccttaaactgaaaatggcaactaatccggcagccaactgcgtcagaatgaactcatgcggaaaacgcagggatatagagcagattaatattgtaatgacatgcgtcaggaaggcagtccgtgaatcgaggaaaacccgtatgatgatgggcagcatcgcatacggaatcatatatacattaaatatattatgtgataccatgaaagctgttactacactataaaatacaatcagtgtaaacagtaacgacaggctgcctttgcgctcataataatcttttcggaacaggtcgagatagagcataaagcaaagcatcagcataccgacaaacaaaatctgcccgccaagaatcaagcggctctgatcaatggattcacttcgcttgatagactctttgcgtaatgattccagaatattgtacgtttccgggctgatgatttctccacggtctataattttctgtccgctgacgactaatccgttggcccaggaatagttgttcagcatttcctctttggcggtctgtgtccgttgctggtcgaatgtgagattgggagtgatgtattcgtttaatgaacattgtctcagaatctcacggttgaagtgggtcgtatctgcggaaagcaagtactcataagcttttttgaccgtatatatatgatcggtaggcttggagttggcgagcttatcgtcgatgatcatgattgccgaagtactgtccttgtggagttcttgtatgttttctgtcgaaacgatgccctctccgtatatttcttttaatgtccgttcgatgtatcgcagataatctacggaaggaagtatacctttcaggtgagtatggtaattctctttcagcttggcgattgcgtctttctctacttgtttgtcaagcagataataaggttggaaggaagccagcagactatcctgttcccggttcaccactgcgtcgtctttatagatcggaaagtcaaaagtggctatcagctgcccgtacttccagggcttgtttatgtcaaactgatagttgaattttccgtcacgtggcaggaaatagacaatcagtgtcactgtcgctacaaacagcaatgatttatataatatatctcttcttgagaacctctttttcttcttcatatgttccatacgcattgaaatttttgcgaaaagtacaaaaaaaaacaatagtgtggaaaaaaaggtttaattttgccacgatttacctatactaacccaaattatggcagaaagaaaagtaagagttcgttttgctccgagtcctacgggagcattgcacatcggtggtgtgcgtacagctttgtataattatctatttgcgcgtcaacacggcggagacctcattttccgtattgaagatactgactccaaccggttcgtgccgggagcggaagagtatatacttgagtcattcaagtggttgggtatccactttgacgaaggagtgagcttcggtggagaacacggcccgtaccgtcagtccgaacgtcgtgaaatctataagaaatacgtgcagattttgttggataatgacaaggcatacatcgcttttgatactcccgaggaactggacgctaaacgtgcggaaattgctaacttccaatatgatgcatctacccgcgggatgatgcgcaattctctgacaatgtcgaaagaagaagtggacgcattgattgctgaaggaaagcaatatgtggttcgctttaagatcgagccgaacgaggatgttcacgtgaatgacttgattcgtggcgaagtcgttattaattcatctattctggatgacaaggtgctttataagtcggctgacgaactgcctacttatcatctcgcaaacattgtggatgaccatttgatggaagtgtctcatgtaatccgtggcgaagaatggttgccttcggcaccgctgcacgtacttttgtaccgtgcattcggctgggaagacacgatgccggaatttgcccacttgcctttgctgttgaagccggaaggaaacggtaaactaagcaagcgtgacggcgaccgtttgggattccctgtattcccgttggaatggcgtccggaatcgggagaagtgtcttccggatatcgtgaatcgggttatttgcccgaagcggtgattaacttcctggctttgttgggatggaatccgggcaacgatcaggaagtgatgtctatggacgagatgataaaactgttcgacattcatcgttgcagcaagtccggagctaaattcgactataaaaaaggtatttggttcaatcatcagtatatccagcttaaaccgaatgaagaaattgccgaactgtttttgcctgtgctgaaagagcatggggtagaggctcctttcgagaaggtcgttacggtagtcggcatgatgaaagaccgtgtaagttttatcaaggaactgtgggatgtatgtagcttcttctttgtagctcctgctgaatatgacgaaaagacagtgaagaaacgctggaaagaagactcggcaaaatgtatgactgagttggcggaagtaattgccggcatcgaggatttcagcattgaaggtcaggagaaagtagtgatggactggattgctgaaaaaggttaccatacaggtaatataatgaatgctttccgtctgacactggtaggcgaaggtaaaggtccgcatatgttcgatatttcctgggtgttgggcaaggaagagacattggctcgtatgaagcgcgccgtagaggtacttaaataattaggatttgtaaattatgctttacaatctggcaatagttatttatgaccttttggttcattttgctgctccgttcagccgtaagccccgaaaaatgatgaaagggcattgggtagtgtatgaacttctacgacagcaagtggagaaaggggagcagtatatttggtttcacgctgcttcgcttggcgagtttgaacaagggcgtccattaatagaaatgatcagggaaaaatatcccgattataagatattgcttacatttttctctccgtccggttacgaagtgcgcaagcattaccggggagcggacattgtctgctatctgccgtttgataaaccgcggaatgtgaagaagttcctggatatcgcaaacccgtgcatggcattctttatcaagtacgaattttggaagaattacctggatgagcttcataagcgtcgcatcccggtgtatagtgtttcttccattttccgtcgcgatcagatattctttaaatggtatggtgggacttatcgtaatgtgctgaaggatttcgatcatttgtttgtgcagaatgaggcttccaaacgctatttgtcgaagattggcattagtcgtgtgacagtggtgggagatacccgtttcgaccgtgtgttgcagattcgggaagaggccaaagaccttccgttggtgaaaatgtttaaaggagacaatgcctttacgtttgtggcaggcagttcttggggaccggatgaagatttatttctggagtacttcaacacccatccggaaatgaagttgatcatcgctccgcatgtgattgatgaaaatcatctggtggagattatcagtaaactgaaacgtccttatgtacgctatactcgtgctgacgaaaagaatgtactgaaagttgattgcttgattatcgattgcttcggactgttatcttctatttaccgctatggagaagtggcttatatcggaggtggttttggcgtcggtattcataatacgctggaagctgctgtatatggcatccctgttatcttcggaccgaaatatcagaagtttatggaagcaatccggttgctcgaagctaaaggcgcatactctattaaagactataacgagttgaaaaccttgttggaccgtttccggacagatgacgttttcatgcgtgagaccggcgcgaatgccggttattatgtgaccagtaatgccggagctacggagaagattatgcacatgattaacttttagagatggataaagttgcttcaagtcttcagaataaataatttgaaatagataaatggagcggcttcattaatgaactgaagtttgatataaagaatatagatccccttattttagaactcctgttgtggacgaagctaaaataggggatctttttatgaatctattttttctttatttataccattgggaatacatcaggtaattgtgagcgattttttggtttagttcctttgcctgttccgggtctaccttcttgataaatttagccggtacccctccccagatacttccgggttcgatcactgtattgctcaagaccaaagaaccggcggcaacgatggccccttcgcctattacggcatgatccagtatagtagatcccatcccgataagtgcataatctttgacggttgctccgtgaatcgtcacattatgtcctacggaaacatgatcaccaatttcgatggttgacttctcgtataaagtatgtagcacgcttccatcctgaatattgactccattacctatccgtatggaattaacgtcaccgcgcaatactgtacaaaaccagatgctacagtcatttcctatttttacatctcctatgatggttgcattatctgcgagaaaacagttctctccaatttcgggggtaaagccccgcactgatttgattaaagccataaattatattgtttctaatgatgtttttattgaatatgattggggattgttcgacacccgggtctcgtgatgtctgacacccggatctcagactgcctgacacccgggtgttaagcagcctgacatccgggtgtcagacaaaagctgttttaaatagcttttgttgcttctagcagccatttcttttcttcttcgttcagacttggagaaagttttttgtaaacggtttgatggtagtcattgaaccacttgacttcttctgctgtcagcatttctttgatgataccttttttgcaaatcgggcatagggtgatcgtctcaaatttgaaatattctccgaacatgccttccttatctttgcagaccaatgtcagattctcggtgcgtatcccgtggctgcctgccttataaacaccaggttcattggatgtaaccataccgggttgcagcacaatgggattttcgttcatacggatactttgcggaccttcgtgtacgctcagaaaatgtcctacgccatgtccggtaccatgaaggaagttcatgccatgactccagataggcatacgggccaatacatcgagttgggcgccgcgtgttccggctgggaatttagccattgccaatgcaatatggccttttaatattaaggtatagtctgttttttcttcctccgtcagttcgcctaatgcaatggtacgggtgatgtcagttgttccatccagatactgcgctcccgaatctaacagcaagaaacctttagactgaagcgtgacatcactctcctccgttgcggaatagtgtacgattgctccatgctctttatatccggcgattgtgtcaaaactttctcccatatacaaaggttgggctgctctgaactcatgcagcttccggtctacgctcagttcggtctctttgcccgaaagcactgatgcttccagccatttgagaaacttgacaagcgccacgccatcccgctgcattgcgtgatggatgccggcaatctcctgctcattgcgaatggctttcagtaatgtcacaggagattctccacgaacgaccttacatgctggattgatagccgaataaatcgcatagttcgttttctttgggtcgataagtatgttttctcctgcaaaagaattcaggaaagattcagcttcgtcatattttctcaggctgacttgctgctcttgcaagtattcatttacctcttgggtaatcttttccggcgaaatgaagtagactacttcatcttgagtaaccagtagataacttactataaccggattgcaatgcacatcacttcctctcagattgagagtccatgctatttcgtccagactggataaaaataaagcaaagatgcctttctttttcagctcggtacgaatggcggcaactttttctccacaactttttcctgcatatttaacatcgtagataaaagccggagcatcaggcatggatggacggtccttccaaatgtttttcagtggatcgccaaacagattgacctgtaactgatagggggcaagatcttctttcatttgttccacctgttgcacggaaaacattttcccatcaatactcacagattctcccggctttagattctgacagaggaactttgtgatactaggagtttccggcagcatctctttatataatgtaatgccgctgccttccagttccttttccgcttgcaggaaataacgggaatctgtccatagtccggctttatccattaagatgacggctgttccggcggaacccgtgaaaccggaaatccattcacgggacatccaataaggagctacatactcactcaggtgaggatcggtgctgggaatgatgaacgctttgatattgttagggcggaatgtcatccgtagtgcgtgtatacgctcttttatgctctgcttcataccttattatgttatttatagacatatttatgagtctcaaaggtactaacttttcgcggttaatgatttgtttatgaatagtttttgagaaatatttgccgaaagttttgtgaataaagaaagtatgtgtaattttgcggcgcaatttgactgcggaaatttttaaccaataacatattaataataacaaaatgattgtagtacctgtaaaagaaggcgaaaacattgaaaaagcgctgaagaagtttaaaagaaaatttgagaaaactggcatcgtgaaagaattaagaagcagacagcaatttgataaaccgtctgtaactaaaagacttaagaaagagcgtgcagtttatgtacaacaacttcagcaagtagaagattaataattcgtaatttcctttgaattattgaattcttttcatacattcgttgcacgattttagatgtagcgatattatgttaattaaatcttttcttgattacctccggtatgagcggaattattccgaaaaaaccgttctggcgtatggcgaggatataaagcaactacaggagtttgctcaggaagagtacggaaagtttgatccgttggaagtggaaggtgaactgattcgtgaatggattgtttcattaatggacaggggatatacttcaacttctgtaaatcgaaagctaagttcgctccggtcgttctataagtatcttttaaggcaaggagaggtgaccgtagatccgttacgaaaaataacaggacctaagaataagaaaccgttacctgtctttctgaaagagagcgaaatggataagttgctggatgatacggattttggcgaaggatttaaaggttgtcgtgatcggttgattattgaaatgttttatgctacaggcatgagactatcggaattgataggtctggatgataaggatgtggatttttctgcttctcttttgaaagtaaccgggaaaagaaacaagcaacggctaataccgttcggtgatgaactgaaagagttgatgcttgaatatattaatgtaagaaacgaagcgattccggaaaggtcgaaggctttctttattaaagaggatggcggacggctttataagaatctagtctataatttagtgaaacggaacctgtcaaaggtggcgacgttgaaaaaaagaagtcctcacgtgctgaggcatacttttgctaccacaatgctgaataatgatgcagaattgggtgcggtaaaagaacttttgggtcacgagagtattgcaactaccgagatctatgcgcatgctacatttgaagaacttaaaaaagtgtataaacaagctcatccaagagcttaaaaaaaggaggtaagtatggatattagaattcaatcaattcactttgatgcgtcagagcaattgcaggcatttattcagaagaaagtgtctaagttggaaaaatattacgaagatataaagaaagtagaggtgtcattaaaggtagttaagccggaagctgctgaaaataaagaggcaggcataaagattcttattcctaatggtgagttttatgcaagtaaagtgtgcgatacattcgaggaagcagttgatttggatgtggaagcacttgaaaaacaactggtgaaatacaaggaaaaacagcgtagcaaataaaaaaatcgcaaatattttgcgggaaagaaataaataactaaatttgcagccgtttcgctcgcgttagaacgtgacggttgcattttttagctagaatgcctctttagctcagttggccagagcacgtgatttgtaatctcggggtcgttggttcgaatccgacaagaggctccaaggatgaatgaggatcatccgattttagcgaaagggatgacggcagtcaattcggttcgcatggcggggaagaattagaagaagaactgagaataaaacatctatgttcagagtattgttcgctatttgattttaattctttgtttgaaatattaagggcaaataccagagtggccaaatggggcagactgtaaatctgctgtctttcgacttcggtggttcgaatccatctttgcccacaatcagagtgacaactttggcaagaatgcggaagtagctcagttgatagagcattagccttccaagctgagggtcgcgggtttgagccccgtcttccgctcttttttttcttgctgttatagctcagcggtagagcacttccttggtaaggaagaggtcccgggttcaagtcccggtaacagctcataaagatgtaaatgctgattattaatcaaataaataacaagtaaagctatggctaaagagaaatttgaacgtaccaaaccgcacgtaaacattggtacaatcggtcacgtagaccacggtaagacaacgttgacagctgctatcactactgtgttggcaaaaaaaggtctttctgaattgcgttctttcgattctatcgacaacgctcctgaagaaaaagaaagaggtattactatcaatacttcacacgttgagtacgaaacagctaaccgtcactacgcacacgttgactgtccgggacacgccgactacgtaaagaacatggtaactggtgctgctcagatggacggtgctatcatcgtttgtgctgcaactgatggtccgatgcctcagactcgcgaacatatcctgttggctcgtcaggtaaacgtacctcgtctggttgtattcttgaacaagtgcgatatggtagacgacgaagaaatgttggaactcgttgaaatggaaatgagagaacttctttcattctatgatttcgatggtgacaatactcctatcatccagggttctgctcttggcgcattgaacggtgttgaaaaatgggaagacaaagttatggaactgatggatgcagttgataactggattccacttcctccgcgcgatgttgataaaccattcttgatgccggttgaagacgtgttctctatcacaggtcgtggtactgtagcaacaggtcgtatcgaatctggtatcatccacgtaggtgatgaagttgaaatccttggtttaggtgaagataagaaatcagttgtaactggtgttgaaatgttccgtaaactgttggatcagggtgaagctggtgacaacgtaggcttgttgctccgtggtgttgacaagaacgaaatcaaacgtggtatggttctttgtaaaccgggtcagattaaaccgcactctcgcttcaaagctgaggtttatatcctgaagaaagaagaaggtggtcgtcacactccgttccacaacaaataccgtcctcagttctacttgcgtactatggactgtacaggtgaaatcactttgccggaaggaacagaaatggtaatgccgggtgataacgtaactatcactgtagagttgatctacccagtagcattgaacccaggtcttcgtttcgctatccgcgaaggtggacgtacagtaggtgctggtcagattactgaaattatcgactaatacacaataattaatcagttcccggttttactatcgggaactgattatgtacaaacgggagtagctcagttggtagagcaccggtctccaaaaccgggtgtcgggagttcgagcctctcctcccgtgctaatattattgaaatgaaaaaggtaatagcttatattaaagaatcttacgacgaacttgttcataaagtatcgtggcctacgtattccgaacttgctaacagtgcagtagttgttttatatgcttccctgcttattgcattggtagtatggggtatggatgtctgtttccagaacttcatggaaaaaattgtttatccacattaaaaaattaggaattgaaaatggctgagattgaaaagaaatggtacgttctgcgtgctattagcggaaaagaagctaaggtaaaggaatatcttgaagctgaccttaaaaacagcgaccttggtgaatatgtatctcaggtattgattccaactgaaaaagtgtatcaggttcgcaatggtaaaaaaattgtgaaagagagaagttatctccctggttacgttttggtggaggctgctttggttggtgaggtcgctcatcatctgcgcaatactccgaatgtgataggctttttaggcggctccgagaaaccggtgcctctcagacaatcagaagtgaatcgtatacttggtacagtagacgaactacaggaaacgggtgaagaactcaatattccgtatgtagtgggtgagactgtgaaagttacttttggtcctttcagcggattcagtggtatcattgaagaagtgaatagtgaaaagaagaaactaaaggtcatggtgaagatattcgggcgcaaaacgccgcttgaattaggctttatgcaagtggaaaaagaataacgcggaattgttacgctgttgttgttcttcgtttaatgtttatatataaatcaataaaaaaatggctaaagaagttgctggactaatcaagttacagattaaaggaggcgctgcaaatccatcacccccagttggacctgctttgggttccaagggtattaatatcatggaattttgcaagcaattcaatgccagaacccaagacaaggcaggtaagattttgcctgttatcattacttactacgcagataagtctttcgattttgtaatcaagactcctcccgttgctattcaattgcttgaagtagctaaggtaaagagtggttctgctgagcctaaccgtaagaaagttgccgagcttacttgggaacagattcgtacgatcgctcaggacaaaatggttgacttaaactgttttactgtggatgctgccatgagaatggttgctggtacagctagaagtatgggtatcgctgtaaaaggggagttcccggttaataactaataaacttcaattgtaatgggtaaactgacaaaaaatcaaaagttagctgcagaaaaaattgaagcagggaaagcatactcactgaaagaagctgcatctttagtaaaagaaattactttcactaaatttgatgcctcactggatattgacgtacgtttaggtgtagacccacgtaaagctaaccagatggtgagaggtgttgtttcacttcctcatggtactggtaaagaagtacgtgttttggtactctgtacaccggatgctgaagctgctgcaaaagaagctggtgctgactatgttggtcttgacgaatatattgaaaagatcaaaggtggatggactgatattgatgtaatcatcactatgccatctatcatgggtaaaattggtgcactcggtcgtgtactcggtcctcgtggattgatgcctaacccgaagagtggtactgtaactatggatgttgctaaagctgtaaaagaagtaaaacaaggtaagattgactttaaagttgataagagcggtattgttcatacttctatcggtaaggtatcattcagtcctgatcagattcgcgacaacgcgaaagagttcatctctactctgaacaaactgaaaccgaccgcagcaaagggtacatatattaagagtatttatctttctagtacaatgagtgcgggtatcaaaatcgacccgaaatcagtggatgaaatctaataaaacagagaaataatgagaaaggaagataaaaattcgattatagagcaaattgctgctacagtaaaggaatatggccacttctatttggtagacgttacagcgatgaacgctactgctacaagtgcattgagaagagattgtttcaagtctgacatcaaattgatggtagttaagaatacattgcttcacaaagctcttgaaagcctggaagaagacttttctcctctttacggttctttgaaaggtacaactgctgttatgttttgcaatactgcaaacgtacctgctaaactgatcaaagacaaagctaaagacggaattcccggactgaaagctgcatatgcagaagaaagcttctacgttggtgcagaccaattggatgctctcgttgctatcaagagtaagaacgaagttatcgccgatatcgttgcattgttgcaatctccggccaagaatgttatttctgctcttcaatcaggtggtaacacccttcacggagttctcaaaactcttggtgagagacccgaataattttcaaaaaacaacaaagtatttaaacaattaaaatcatacaaaaaatggcagatttgaaagcttttgcagaacaattagttaacttgacagtaaaagaagttaatgaacttgcaactatccttaaagaagaatacggtattgaacctgctgctgcagctgttgctgttgctgctggtcctgcagctggtgctgctgctgtagaagaaaaaacttctttcgacgtagtattgaagagcgctggtgcagctaaacttcaggttgttaaggccgttaaggaagcttgtggtcttggcttgaaagaagctaaggacatggtagacggtgctcctagtgtagtaaaagaaggtttggctaaagacgaagcagaatcattgaagaaaacattggaagaagctggagctgaagttgaacttaaataacattagcctggtaatcaggtaattcggttaggaatccttcgcaagaggattcttaacctttttgtgtatatatttcaaattaagttctccaaattcattcacagatgtcttcaaatactgtaaatcaaagagttaattttgcttcgactaagaatccgcttgaatatccggatttcctggaagtacaattgaagtcattccaagactttctacaattagataccccacctgaaaagcgcaagaatgagggtttgtataaagtatttgctgaaaacttccctattgccgatacaagaaacaattttgttcttgagtttttggattattatattgatccgccgcgctataccatcgatgattgtatagagcgtgggctcacatatagtgttcctttgaaagcgaaacttaagctgtactgtaccgaccccgatcacgaggattttgatacagttattcaggacgtattcctcggcccgatcccttacatgactgataaggctactttcgtcattaacggtgccgaacgtgtagttgtgtcacagcttcaccgttctccgggtgtgttcttcggtcagagtgtacatgccaatggtacgaaactttactcggctcgtattattccgtttaaaggttcgtggattgagtttgctaccgacatcaataatgtgatgtacgcatacatcgaccgtaagaagaaattgccggtaactactttgttacgcgcgattggtttcgagaacgataaggatattcttgagattttcaaccttgcagaagatgttaaggtaaacaaaacaaatctgaagagagttctgggtcgtaagttagctgcacgtgttttgaaaacatggattgaagatttcgttgatgaagataccggtgaagtggtttctatcgaacgtaacgaggttattatcgaccgtgaaaccgtactggaggaagtacatattgatgaaattctggaatcgggagttcaaaacatccttttgcataaggacgagccgaatcaatctgatttctctattatatataatactctgcagaaggacccgagtaactcggaaaaagaagctgtgttgtatatctatcgtcaattgcgtaacgccgatccggccgatgatgcaagtgcacgtgaagttatcaacaacttgttcttctcagaaaaacgatatgaccttggtgatgtaggtcgttacagaatcaacaagaaactgaatctgacgactgatatggacgtgcgtgtcctcacgaaggaagatatcattgaaatcatcaaatatctgattgagttgattaattcaaaagcagatgtggatgatattgaccacttgagcaaccgtcgtgtacgtacagtaggtgaacagctttctaaccagtttgctgttggtttggctcgtatgtctcgtacgattcgtgaacgtatgaacgttcgtgacaatgaagtatttactccgattgatttgatcaatgcgaagactatttcttctgtgatcaattctttctttggaacaaatgctttgtcacagttcatggaccagacaaacccgttggctgaaattacgcacaagcgccgtatgtctgccctaggtcctggtggtctttctcgtgaacgtgccggatttgaggttcgtgacgttcactatacacactacggtcgtctttgtccgattgagactcctgaaggtccgaatatcggtttgatttcttccttgtgtgtattcgctaaaattaatgagctgggattcattgaaactccgtaccgtaaggtggaaaacggaaaagtggatctttccgataatggtctggtttatctgactgctgaagaagaagaagaaaagattattgcacagggtaatgctccgttgaatgatgacggtacatttgttcgcaataaagttaaatctcgtcaggacgctgacttcccggttgtagaaccgtctgaagtagatttgatggacgtttctcctcagcagattgcatcgattgctgcttcactgattccgttcctggaacatgatgatgctaaccgtgcattgatgggatcaaacatgatgcgccaggcagttcctttgttgagaagtgaagctccgattgtaggtacaggtatcgaacgacagttagtgagagactctcgcacgcagattactgcagaaggcgatggtgttgttgacttcgttgatgctactacgatccgtattttgtatgaccgtacagaggacgaagaatttgtaagcttcgagcctgctttgaaagaatatagaattccgaagttccgtaagacgaaccagaacatgactattgacttgcgtccgatttgtgacaaaggtcagcgcgtgaagaagggtgacatcctgactgaaggttattctactgaaaagggtgaattagctttgggtaaaaacctgttggttgcttatatgccatggaagggatataactatgaggatgctatcgtattgaacgaacgcgtggttcgcgaggacttgttgacttctgttcacgtagaagaatactctttggaagttcgtgaaacgaagcgcggtatggaagaattgacttctgatattccgaatgtaagtgaggaagctactaaagacctggatgaaaatggtatcgtaagaatcggtgcgcgtatcgaaccgggtgatatcatgatcggtaagattactccgaaaggtgaatctgatccttctccggaagaaaaactacttcgtgctatcttcggtgataaggcaggtgatgtgaaagatgcttctttaaaagcttctccttctttgaaaggtgttgttattgataagaaacttttctcacgtgtaatcaagaaccgtagctctaaactggcggataaagcattgttgcctaagattgacgatgagtttgaatcaaaggttgcagacttgaagcgtattctggttaagaaactgatgactttgactgaaggcaaggtttctcagggtgtgaaagactacttaggagcagaagttattgctaagggatctaagttcagtgcttctgattttgattcacttgactttacttctattcagctgagtaactggactagtgatgaccatactaatggtatggttcgtgatctggttatgaactttatcaagaaatacaaagagctggatgctgaattgaagcgtaagaagtttgctatcactatcggtgatgaacttccggctggtatcattcagatggctaaagtatatattgctaagaaacgtaagattggtgtaggtgataagatggcaggtcgtcacggtaacaagggtatcgtgtcacgtgttgtgcgtcaggaagatatgccgttcttggcagatggtactccggttgacattgtactgaatccgttgggtgtgccttctcgtatgaacattggtcagatttttgaagctgtattaggtcgtgccggaaaaactttgggcgtgaaatttgcaactcctatttttgacggtgctacgatggacgacttggatcagtggacagacaaagcgggattgccacgttactgtaaaacttatctttgtgatggtggtacaggtgagcaatttgaccaggcagcaaccgtaggtgtgacttatatgctgaagctggggcacatggttgaagacaagatgcacgctcgttctatcggtccgtactcattgattactcagcaacctcttggtggtaaagcacagttcggtggtcagcgtttcggagaaatggaggtttgggcactcgaaggcttcggtgctgctcatatcctgcaggaaatcttgactattaagtctgacgacgtagtaggacgttctaaggcttatgaagcaattgtgaaaggtgaaccgatgccgcaacccggtattccggaatccttgaacgtattgttacacgagttgagaggtttaggtttgagtatcaacctagaataaaataatgaaagaatgcaggatgtcaataggccgatgaaggtctgttgacattcgcatcttcttcaatttccaatgattcaattatcaaatctcaattatatagagtatggcttttagaaaagaaaataagacgaaaagcaatttctcgaagatctcaattggtctggcttctccggaagaaatcctagagaattcgagtggtgaagttttgaagcctgaaaccataaattaccgtacgtacaaacccgaacgcgatggtttgttctgcgagcgcatttttggtcctattaaggattacgaatgccattgcggtaaatataagcgtatccgttataaaggtatcgtctgcgaccgttgtggtgtagaagttacagaaaagaaagtacgccgtgaacgtatgggacatatacagttggtggtgccggtggcacacatctggtatttccgttcgcttccaaataagatcggttatttgctcggactgccgacaaagaagctggattcgattatatattacgaacgttatgttgttattcagccgggtgtaaaggctgaagatggcattgccgaatatgatttactttctgaagaagaatatctggatattctggatacacttccgaaggacaatcaatatctggaggataatgatccgaataagttcatcgctaagatgggagctgaagcaatctatgatttgctggctcgtttggatctggatgctctgtcttatgaattgcgtcaccgtgcaggcaatgatgcttcacagcaacgtaagaatgaggcattgaaacgtctgcaggttgtagaatcgttccgtgcatcacgtggacgtaacaagccggaatggatgattgtacgtatcgtaccggttattccgcccgaactccgtccattggttccattggatggtggtcgttttgctacttctgacttgaatgacctttatcgtcgtgttatcattcgtaacaaccgtctgaagagactgatcgaaatcaaagctccggaagtaatcttgcgtaatgagaaacgtatgcttcaggaatctgtagactcattgttcgataattcacgtaaatcaagtgcagtgaagacggatgctaaccgtccgttgaaatcactgtctgatagcttgaaaggtaaacaaggacgtttccgtcagaacttgttgggtaaacgtgttgactactctgcacgttcggtaattgttgttggtccggaactgaagatgggtgagtgcggtattcctaaattgatggctgccgaactttataagccgtttattatccgtaagctcattgaacgtggtatcgttaagacagtgaaatctgcaaagaagattgtagatcgtaaggaagcggtgatctgggatattctggaacacgtaatgaaaggacatcctgtactgttgaaccgtgctccgacattgcaccgtttgggtatccaggcattccagccgaagatgatcgaaggtaaagctatccagttgcacccgttggcatgtacggcattcaacgccgacttcgacggtgaccagatggctgttcacttgcctttgagtaacgaagcaattcttgaagctcagatgttgatgcttcagtcacataatatcctgaatccggcaaatggtgcgcctattactgtgcctgcacaggatatggttcttggtttgtattacattaccaagttgcgtgccggtgctaagggagaaggacttacattctacggaccggaagaagcattaatcgcttataatgaaggtaaggtagatattcatgctccggtaaaggtgatcgtgaaagacgttgatgaaaatggtaacattgttgacgttatgcgtgaaacttctgtaggacgtgtgattgttaatgaaattgttcctcctgaagcaggttatatcaatacgattatttctaagaaatctcttcgtgatatcattagtgatgtaatcaaggtttgtggtgtggctaaagctgcagacttcttggatggaatcaagaacttaggttaccaaatggcctttaagggtggtttgtcattcaacttgggtgatattattatcccgaaagaaaaagagacattggtacaaaaaggttacgacgaagttgaacaagtcgtaaacaactataatatgggtttcattaccaacaacgaacgttataatcaggtaattgatatctggacacatgtgaactctgagttgtctaacatcttgatgaaaactatttcttcggatgaccaaggatttaactctgtatacatgatgctggattcgggtgcccgtggttctaaagaacagattcgtcagttgtccggtatgcgtggtttgatggctaagccccagaaagctggtgctgaaggtggtcagattattgaaaacccgatcttgtcaaactttaaagagggactttctgtgttggagtactttatctctactcacggtgcccgtaaaggtttggcggataccgctttgaagactgccgatgccggatatttgactcgtcgtctggtagacgtttctcacgacgtgatcatcacggaagaagactgcggtacacttcgtggattggtttgtacagacttgaagaataacgatgaagtaatcgctaccctgtatgaacgcatcttaggtcgtgtttctgtacatgatattattcatcctactacaggcgaattgcttgttgccggtggtgaagaaatcacagaagaagttgctaagaagattcaggattctccgattgaaagcgttgaaatccgttctgtattgacttgtgaagcgaagaagggtgtttgtgctaagtgttacggacgtaacctggcaacaagccgcatggttcagaagggtgaggctgtcggtgtaattgctgctcagtcaatcggtgagccgggtacacagttgacattgcgtacattccacgccggtggtactgctgcgaatattgcggcaaatgcaagtattgtggctaagaacagtgctcgtctggaatttgaagaacttcgtacggtagatatcgtagacgaaatgggtgaagctgcaaaagtagtggtaggccgtttggctgaagttcgttttgtggacgtaaatactggtatcgttctttctacgcacaatgtaccttatggttctacattatatgtatcggatggtgatctggttgaaaagggtaagttaattgctaaatgggacccgttcaatgccgttattataactgaagcaactggtaagattgaattcgaaggtgtaattgagaatgttacctataaagtggaatcggatgaagcaaccggtcttcgtgaaatcatcattattgaatctaaggataaaacgaaagttccttcggctcatatcctgacagaagacggtgatctgattcgtacttataacttaccggtaggtggtcacgtgattattgaaaatggtcagaaagtgaaagccggtgaagtaatcgtgaagattccgcgtgctgtaggtaaggcgggtgacatcacgggtggtcttcctcgtgttactgagttgtttgaagcacgtaatccgtctaatcctgctgtcgtttctgaaattgacggtgaggttacaatgggtaagatcaagcgtggtaaccgtgaaatcatcgtaacttcgaaaacaggtgaagtgaagaagtatcttgttgcattgtccaaacagattctggttcaggagaacgactatgtgcgtgctggtactccattatctgatggtgctactactccggctgatatcctggcaattaaaggtcctacggctgtacaggaatatattgtgaatgaagttcaggatgtataccgtctgcagggtgtgaagatcaatgataagcattttgagattatcgttcgccagatgatgcgtaaggttcagatcgatgagccgggtgatactcgcttcttggaacaacaggtagtggataagcttgagtttatggaggaaaacgatcgtatctggggtaagaaagtggttgttgatgcaggtgattctcagaatatgcagccgggacagattgtgactgcccgtaagttgcgtgatgagaacagtatgctgaagcgccgtgacttgaaacctgttgaggtacgtgatgctgtagctgcaacttctactcagattcttcagggtattacgcgtgctgcactgcagacttcaagctttatgtcagctgcatccttccaggaaacaacgaaggtgttgaatgaggctgctatcaatggcaagacagataaacttgaaggaatgaaggaaaacgtaatttgcggtcacttaattccggcaggtacaggtcagcgtgaatttgaaaagattatcgttggttcaaaagaagagtatgatcgtatcttggcgaacaagaagacagtacttgattacaatgaagtagaataatacaattcaattgactatatgaaaaaggagcgattgctgtagcaggcagttgctcctttttttgtttcttttacctgactgtatcattcttatctcgataaaattttgttattttgcaaaaaaacattttatcttatttaatatggaagaacaaaataacaaccagttacagatcgagttgaaagaagaagtagcgcaaggaacttatgcgaatcttgcaatcattactcattcaagctctgagtttattctagactttgtacgggttatgccaggagtgccgaaagcaggagtgcaatctcgtattatagtagctccagaacacgcaaaacgcttgttgcgggcattggaggataacatagcaaagtatgaacgtgcttttgggcctattcgtatttctgaagagtcaccgatgcctccgctaagtgttgtaaaaggcgaagcatgaggttgatataaaaacattaaaaaagaaaaaaaagttgtagcgcattgaatattcaaatattattcgtatttttgcagcccaaaatgtatagttacgaaattaatataacaataatataaatcaaaaaacaattaaaatgcctacaattcagcaattagtaagaaaaggacgcgaagtgctggtggagaaaagtaaatctccagccttggattcatgtcctcaaagacgtggcgtttgcgtgagagtatatactactactccgaagaagccgaactctgcaatgcgtaaagtagctcgtgtacgtttgactaaccaaaaagaggttaactcatacattccgggagaaggacacaatttgcaggaacactcaatcgttttggtacgtggcggtcgtgtaaaagaccttcctggtgtacgttaccacattgtacgtggtacacttgatactgcaggtgttgctggtcgtactcaaagacgctctaaatacggagctaagcgtccgaaaccaggacaagctgcgccggctaagaaaaaataaggattaaaacctaattagaattaaagtaataacttacgttttagtttgttggaaatgctaaaggttgagtaaattctccggtgggagagttgaagaagtcaagaagtagacaaccaagaacaaaaacattatttttcaaacaaatgagaaaagcaaaaccaaaaaaacgcgtaatccttccggatcccgtttttaatgaccaaaaggtttctaagtttgtaaaccatttgatgtatgatggtaaaaagaatgcgtcttatgaaatcttttatgccgctctggaaacagtgaaagcaaaacttcctaacgaagaaaaatcagctctcgaaatttggaaaaaggctttggataatgtaactccgcaagtagaagtaaaatctcgtcgtgtaggtggtgctaccttccaggttcctactgaaatccgtcctgatcgtaaagaatcggtttcaatgaaaaacttgattctgtttgctcgcaaaagaggtggtaaatctatggcagacaaattggctgctgaaatcatggatgcctttaacgaacaaggtggtgcatacaaacgtaaagaagatatgcatagaatggctgaagctaaccgtgcatttgcccatttcagattctaatactataagaatataaccgatttagattaaaaacttaaagtaaaggaataagaaaatggcaaagacagatttacatttgactcgtaatatcggtatcatggctcacattgatgccggaaaaacaacaacttctgaacgtatcctgttctacactggattgactcacaaaattggtgaggtacacgatggtgctgcaacaatggactggatggaacaggagcaagaacgtggtattactattacatctgctgcaacaacaacaagatggaaatatgctggtgatacttataaaatcaacttgattgacactccgggacacgttgactttactgctgaagtagaacgttcgttacgtattctggatggtgctgtggctgcttactgtgcagtaggtggtgtagagcctcaatcagaaactgtatggcgtcaagctgataagtataatgtgccacgtattgcgtacgtaaacaaaatggaccgttcgggtgctgacttctttgaggttgtacgccagatgaaagctgttttgggtgctaatccttgtccaatcgttgttcctattggcgctgaggaaaccttcaaaggtctagtagacttgattaaaatgaaagctatctattggcatgatgaaacaatgggggctgactatacagttgaagaaataccggcagatctcgttgatgaagcaaatgaatggagagataaaatgcttgaaaaggtagctgagtttgacgatgctttgatggagaaatatttcgacgatccttctactattacagaagaagaagtgttgagagctcttcgcaatgcaacagttcagatggcagttgtaccaatgttgtgtggctcttcatttaagaataagggtgttcagacattgttggactatgtttgtgctttcttgccttctccattggatactgagaatgtgattggtacaaatccgaatacaggtgcagaagaagatcgtaaaccgagtgatgatgagaaaacatcagctttggcatttaagattgctactgacccttatgtaggtcgtttgactttcttccgtgtatattcgggtaagattgaagctggttcttatatctataattctcgctctggtaagaaagaacgtgtttctcgtctgttccagatgcattcaaacaagcagaatccggttgaagtaatcggtgctggtgatattggtgcaggtgtaggttttaaagatattcatactggtgatacgctttgtgatgaaacagctccgatcgtattagagtctatggacttcccagaaccggtaatcggtattgcagttgagcctaaaactcagaaagacatggataaattgtctaacggtttggctaagctcgctgaagaagatccgacatttacagttaagactgatgagcaaacaggacagactgtaatctctggtatgggtgagttgcacttggatatcattattgaccgtttgaaacgtgaatttaaagtagaatgtaaccaaggtaaacctcaggttaattataaggaagctatcactaagacagttgatcttcgtgaagtttataagaaacagtctggtggtcgtggtaagtttgcagatattattgttaagatcggtcctgttgatgaagatttcaaagaaggcggattgcagtttatcgatgaagtgaagggtggtaatattcctaaagaatttattccttcagttcagaaaggtttcacaagcgcaatgaagaacggtgtgttggccggatatccgttggattcaatgaaagtaactttgattgatggttcattccacccggttgactctgaccagttgtctttcgaaatctgtgctattcaggcatataagaatgcatgtgctaaagcaggtccggtattgatggagcctatcatgaaactggaggttgttactccggaagaaaacatgggtgatgtgatcggtgacttgaataagcgtcgtggccaggttgaaggtatggaatctagccgttccggtgctcgtatcgtgaaagcaatggtgccactggctgaaatgtttggttatgtaacagcgttacgtactattacatcaggtcgcgcaacttcatcaatggtatattctcatcacgctcaagtttctaactctattgctaaggcagtattggaagaagttaaaggacgtgctgatttactctagaagaatatcaaaagcagcaggctagcgaatgactcttagcctgccgctttatcttatttataaatatattaatttaaaaccataatgagtcagaaaattagaattaaattgaaatcttacgaccacaacttggttgacaagtcagctgagaagattgtaagaaccgtaaaggctacgggtgctattgttagtggtccaattcctctgcctacgcacaagcgtatctttacagtaaaccgctcgactttcgttaacaagaagtcacgtgaacagtttgaactctcttcttataagagattgattgacatctatagctcaactgctaagacagtagatgctcttatgaagcttgagttgccgagtggtgtggaagtagaaattaaagtttgataattaaaaattagtgaaatgccaggattattaggaaaaaaaatcggaatgacatccgttttcagtgctgatggtaagaatgtaccatgcactgttatcgaagcaggtccttgtgttgttactcaggttaaaactgtcgaaaaagatggctatgcagctgttcagttgggttttcaggacaaaaaggaaaaacatacaactaaaccgttgatgggtcactttaagagagctggagtaacaccgaagagacacttggccgagttcaaagaatttgagacagagttgaatctgggtgatactattactgtagagatgtttaatgacgctaccttcgtagatgttgtcggaacctctaaaggtaaaggcttccagggtgtagttaagagacatggtttcggtggtgtaggtcaagctactcacggtcagcataaccgtgctcgtaagccgggttctatcggtgcttgttcttatccagctaaagtattcaaaggaatgcgcatgggcggacagctcggtggtgacagagttactgttcaaaacttgcaggtattaaaagtaatcgcggatcataaccttcttttgatcaaaggttctatcccgggttgcaaaggttcaatcgtaataattgagaaataatggaagttaacgtatataacattaaaggtgaagacactgggagaaaggttacgttaaacgaatctatcttcggaattgagcccaacgaccacgctatctatttggatgtaaagcaatttatggccaaccagcgtcagggtactcataagtcaaaagaaagaagtgaaatcagtggctctactcgtaagatcggtcgccagaaaggtggtggtggagcacgtcgtggtgatatgaattcaccggtgctcgttggtggtgctcgtgtttttggtccgaagccaagagactacttcttcaagttaaataaaaaagttaagacattggctcgtaagtcagcattgtcttataaagttcagaacaacgcgcttattgttgttgaagacttcgtttttgaagctcctaagacaaaagatttcgttgctatgacaaaaaatcttaaagtttccgataaaaagctacttgtaattttaccggaagcaaataaaaacgtatatttgtcagctcgtaacatagagggtgcaaacgtgcagactgtctcaggattaaatacttacagagtattgaatgctggggttgttgtgcttacagaaaactctctgaaggctattgacaatatcttaatttaaaaaggaggcttaaataatgggaattattattaaaccgttggtaacagagaaaatgactgcaatcactgataagctgaatcgttttggctttgttgtacgtcctgatgctaacaaactggaaattaagaaggaagttgaagctctttataatgttactgtagttgatgtgaatacagtgaagtatgcaggcaaaaataaaagccgttatactaaagcaggtatcatcaatggacgtacgaatgcattcaaaaaagcaatcgtaacattgaaagaaggagatactattgatttttatagtaatatttaataaaaatggcagtacgtaaattaaagcccacaacaccggggcaaagacataaaattattggtactttcgaagaaattactgcatcagtaccagaaaagtctcttgtatatggtaagaaatcatctggtggtcgtaacaacgaaggtaagatgactatgcgctacattggtggcggtcatagaaaggtgattagaattgttgatttcaagagaaacaaagacggtgtaccagcagtggttaagacaattgaatacgatccgaatcgttcggctcgtatcgctttgttatattacgctgatggagaaaaaagatatattattgctcccaatggattgcaagttggtgcgactctgatgtcgggtgaaacagcagcgccagagattggtaatactcttccccttcagaacattccggttggtactgtaattcacaatattgagttacgtccgggacagggtgctgctctggttagatcagctggaaactttgctcagttaacttctcgtgagggtaagtattgtgtgattaaattgccttcaggtgaagtaagacagattcttagcacttgtaaagctactatcggtagtgttggtaactcagatcatggattggaacgctcaggtaaggctggacgctctcgttggcaaggtcgtcgtcctcgtaaccgtggtgttgtaatgaacccggttgatcacccgatgggtggtggtgaaggacgttcttccggaggacatccaagatctcgtaagggattgtacgctaagggacttaagactagagctcctaagaaacaatcgtctaagtacattattgagagaagaaaaaagtaatctgattaattgagtaaactatgagtcgttcattaaaaaaaggtccatatattaacgtaaagcttgaaaagagaatttttgccatgaatgaatctggcaaaaaagtcgtagtaaagacatgggccagagcttcaatgatttcgcctgattttgtaggccatacagttgcagttcacaatggaaataaatttattcctgtatatgttaccgaaaatatggtaggacacaagttgggcgaatttgctccaactcgtacattcagaggacacgctggtaacaagaaaagataacaggaattatttgaaataataaagtaataaatataatgggagcaagaaaaaaaatatcggctgaaaaaagaaaagaagcccttaagaccatgtattttgctaaattgcaaaatgttcctacttctccacgtaagatgcgcttagtcgctgatatgattcgtggtatggaagtgaacagagcacttggtgttttgaaattttcttcaaaagaagctgctgcaagagtggaaaaattgcttcgctctgcaattgctaactgggaacagaaaaacgaacgtaaagcagaaagcggcgagttgttcgtaacgcagatttttgttgatggtggcgctacactcaaaagaatgagaccggcaccgcagggtagaggttatagaattcgcaaacgttcaaatcacgtaacattgttcgttggtgctaaaagtaataacgaagatcaaaattaaggtagatgggacaaaaagttaatccaataagcaaccgtttaggaattatcagaggatgggattctaactggtatggtggaaatgattacggtgattctttgctggaagatagcaaaatccgtaaatatcttaatgcaagacttgcaaaggcaagtgtatcaagaatcgtaattgaacgtacgctgaagctcgttactattactgtttgcactgctcgcccgggtattatcatcggtaaaggtggccaagaagttgataagttaaaagaagagttgaagaaggttaccgacaaagatattcagattaatatctttgaagtgaaaagaccggaactggatgctgtaattgttgctaacaacattgctcgccaggtagaaggtaaaattgcctaccgccgtgccattaaaatggctatcgcaaatacaatgcgtatgggtgctgaaggtatcaaaattcagatttcaggacgtttgaatggagctgaaatggctcgttctgaaatgtataaagaaggaagaactccgttgcacactttcagagctgatatcgactactgtcatgctgaagcattgactaaagtgggtcttttaggtatcaaagtttggatttgtagaggtgaagtgtttggtaagaaagaattagctccgaactttacacaaagcaaagaaagtggtcgtggaaacaatggtggaaacaacggcggaaagaacttcaaaagaaagaaaaataatcgctaaacgaatttgaattttaggaaactatgttacaaccgaaaaagacaaaattcagaagacaacaaaaaggccgtgcaaaaggtaatgcccagagaggtaaccagctggctttcggttcttttggcattaaggctttggaaactaaatggattacaggccgtcagatcgaagctgctcgtattgcagtaacaagatatatgcaacgtcaaggacagatctggatccgtatattcccggataaaccaattactagaaaacctgccgatgtgcgtatgggtaaaggtaaaggtgctcccgagggatttgtggctcctgtaactccaggtagaatcattattgaagctgaaggagtatcttacgaaatcgcgaaagaagcattgcgcttagctgctcaaaagcttcctattacaacgaagtttgtcgtaagacgtgattatgatattcaaaatcaaaatgcgtaaggtttatgaaaattgcagaaattaaagaaatgactactaatgatttagtagaaagagtagaggcagaaacagctaattataaccagatggttatcaatcattctatttctcctttggaaaatcctgctcaaatcaaacaattacgcaggactattgcgcgtatgaaaacagaattacgccaaagagaacttaacaataaatgatcagcttgatggaagcaagaaatttaagaaaagaaagaacaggggttgtattgagcaacaagatggaaaaaactatcacagttgctgccaagtttaaagaaaaacaccctatatatggtaagttcgttagtaaaacgaagaagtaccatgctcatgatgaaaagaatgaatgcaatatcggtgatactgtacgcatcatggaaactcgtcctttgagcaagactaaaagatggagattagtagaaataattgaaagagctaagtaattatgatacaagtagaatccagacttacagtatgtgataacagtggagctaaagaagctttgtgcatccgtgtattgggtggcacaggtcgtcgttacgcttcagtaggagatgttattgtagtttccgtaaagagtgttatcccttcgagtgatgttaaaaaaggtgcagtatcaaaggctttgattgtacgtacgaagaaagaaatccgtcgtcctgatggttcttatatacgttttgatgataatgcttgcgtgttgcttaataatgcaggtgaaattagaggaagtcgtattttcggtcctgtagcaagagaacttcgtgctacaaacatgaaggttgtgtcacttgcgcctgaggtactttaattttgtaaaagatttgagtaatgagtaaattacatattaaaaaaggcgatacagtttacgtaaatgctggcgaagataagggcaaaactggtcgtgtattgaaggttcttgttaaagaaggtcgtgcaattgttgagggtatcaatatggtatctaagagcactaagccgaatgcaaagaatccgcagggtggtattgtgaagcaagaagcttctatccacatttcaaacttgaacccggttgatccaaaaactggtaaagcaacgcgtattgggagaagaaagagttctgaaggaactttagtgcgttattctaaaaaatcaggagaggagatttagtaatgagtaatactgctagcctaaagaaagaatatgcagatcgtattgcacctgcattgaaatcacaattccagtattcttcaacgatgcaggtacccgtacttaagaagattgttatcaatcaaggtttaggtatggctgttgctgataagaagattattgaagtagcaatcaatgaaatgacagctatcacaggtcagaaggccgtagctaccatttctcgtaaagatatcgcaaactttaagttacgtaaaaaaatgccgattggcgttatggtaactttgcgccgtgagagaatgtatgaattcttggaaaaactagttcgtgtagctcttcctcgtattcgtgacttcaaaggtatcgaaagtaagtttgatggtaaaggtaactatacccttggtattcaggaacaaatcattttccctgaaataaatatcgatagtattacaagaattctcggaatgaatattacctttgtaacctctgcggagacagatgaagaaggttatgccttgttgaaggaattcggtttaccttttaaaaacgctaaaaaagattaatagaatatggcaaaggaatcaatgaaggcacgtgaagtaaagcgtgctaaattagtagccagatacgccgagaaaagagccgctttgaagcaaatcgtgagaacaggtgaacctgccgatgcttttgaagctgcacagaaattgcaagagttgcctaagaattcaaatccaattcgtatgcacaaccgttgcaaactgactggtcgtccaaaaggttatatccgtcagttcggaatttcaagaatccagttccgtgagatggcatctaacggtctgatcccgggcgtaaagaaagcaagctggtaattattgtttaaatattgtcagggaagtcctgattaatttaatttatttttatatgactgatccaatagcagattatttgacgaggttgcggaacgcaattggtgctaagcacagagttgtagaagttcccgcttcgaatttgaaaaaagaaatcactaagattctttttgaaaaaggctacattcttaactataagtttgtagaagatggtcctcaaggaactatcaaggttgccttgaagtatgattctgttaacaaagttaacgcaatcaaaaaattagaaagagtatcttctccgggtatgcgtaagtatactggttacaaagatatgccgcgtgttattaatgggctgggtattgctataatatctacttccaaaggtgtaatgactaacaaagaagctgctgaactgaaaatcggtggtgaagtcttgtgttacgtatattaatttaggaggaataagcaatgtcaagaataggaaaattacccattagtatccctgctggagtgacagtcactctgaaggatgatgtggttaccgttaagggacccaaaggcgaacttagccaatatgtgaatcctgctatcaatgttgccattgaagacggacacgtgactttaacagaaaacgaaaaagaaatgattgataacccgaagcaaaagcatgctttccacggtttgtatcgttctttagttcataacatggttgtgggcgtgtctgaaggatataaaaaggaactggaacttgtcggtgtaggttaccgtgcttctaaccaaggtaacatcattgaactggctttaggttatacacacaatattttcattcaattgcctgctgaggtgaaagttgaaactaagtctgaaagaaataagaatcctcttattatattggaatcgtgtgacaaacaattgcttggtcaagtttgctctaaaatacgttctttccgtaaacctgaaccatataagggtaaaggtattaagtttgttggcgaagtaattcgtagaaagtctggtaaatcagccggcgctaagtaaatcatataaaattagattattatgacaacaaaaatagaaagacgagttaagatcaaatatagagtacgcaataagatttcaggtactgctgaacgtccgcgtatgagtgtatttagaagtaacaagcaaatttatgtccagattatcgatgatctttctggtaagacactggctgctgcttcttctttaggtatggctgagaaagtcgcaaagaaagaacaagctgctaaagttggtgaaatgattgctaaaaaggctcaggaagcaggtataactactgttgttttcgaccgtaatggttacttgtatcatgggagagtaaaagaagtagctgatgctgctcgtaacggtggacttaaattttaatcattatggcaggagttaataatagagttaaggttactaacgatatagaactgaaggatagattggttgctattaatcgtgttactaaagttaccaaaggtggtagaacttttagtttctctgcaatcgttgttgtaggtaacgaagaaggtattatcggttggggacttggtaaagcaggtgaagtaacagctgctatcgctaaaggcgtagaatcagctaaaaagaacctggtgaaagtacctgttttgaaaggtactgttcctcatgaacaatcagctaagtttggtggtgctgaagtattcatcaaacctgcatctcacggaactggtgtagtcgctggtggtgctatgcgtgctgtattggaaagtgttggtattactgacgttttggcaaaatctaaaggttcttcaaatccgcacaaccttgttaaagctacaattgaagctttgagtgagatgcgtgatgcaagaatgattgctcagaacagaggtattagtgttgaaaaagtatttagaggataaggaggagatatgtcaactataaagattaaacaagttaaaagtagaattggtgctccagctgatcagaaaagaactcttgatgcactgggacttcgcaaactgaaccgtgtggttgaacacgaaagcactccttcaattcttggaatggtagataaagtaaaacacttggttgccattgttaagtaattatttgttgaataaaaaaacgaattacaatatgaacttaagtaatttaaaacctgcagaaggatctactaagacaagaaagagaataggacgtggtgccggttctggtttgggtggtacttctacaagaggtcataaaggagctaaatcaagatctggatactctaagaaagttggctttgaaggtggtcagatgcctcttcaacgtcgagtacctaaatttggttttaagaatatcaatcgtgtagaatataaggctatcaacttggatacaattcagacgcttgcagatgctaagaatctgacaaaagttggtattagcgactttattgaagcaggatttatttcttcaaatcaattggttaaagtattgggtaacggagctctgactaacaagctggaagtagaagctaacgcattctctaagagtgctgctgctgctattgaagctgctggtggaactgtagtaaaactctgattcaatgagaaaagctattgaaacattaaagaatatatggaagattgaggatctgagacagcggatcctcatcaccatattgtttgtggcaatttaccgtttcggatcatatgttgtattaccgggtattaatccggcaatgctggcaaaattgcacgaacaaacaagtgaaggccttttagccttgttaaatatgttctctggaggagcattttctaatgcctctatttttgcattaggaatcatgccttatatctctgcatctatcgttattcaactattgggaattgctgtgccgtatttccaaaagttgcagcgcgaaggtgagagcggcagaagaaaaatgaatcaatatactcgttatctgacgattgctatattgttagttcaggccccttcttatttgctcaatcttaaaatgcaggctggcccttccttaaatgcttcattagattggactctgtttatggttacctctaccattattttggcagcaggtagtatgtttattttgtggcttggtgaaagaataactgataaaggtattggtaacggtatttcatttatcatcctgatcggtattatcgctcgtttccctgatgctttgatacaagaagttgtatccagagtagcaaataagagtggtggtctgattatgtttataattgaagtcgtattcttattgttagtgattggtgctgcaatcttgttggtacaaggtacaagaaagattcctgtacaatatgctaaaagaatcgtaggtaataaacaatatggtggtgcaagacagtatattcctttgaaggtgaatgctgctggtgtaatgcctataatctttgctcaggcaatcatgtttattccaattacatttatcggtttttccaataatgtaaataacgcaggtggtttcttgcatgcgtttacagatcatacaagtttctggtataattttgtttttgcggtaatgattatattatttacatatttctatactgcaattacaatcaatccgactcagatggctgaggatatgaagagaaataatggtttcatccctggtatcaaaccgggaaagaaaacagcagagtatattgatgatatcatgtctcgtattactttaccgggttcttttttcttggcattggttgctattatgcctgcttttgctggcatatttggggttcaagctggatttgctcaattcttcggcggtacatctttgttaattcttgtaggtgttgttcttgatacactgcaacaggttgaaagtcatttgttgatgagacattatgatggtctgttgaaatcaggtcgtattaagggacgcgctggtgtagcggcatattaattctttagaatagaaatgatatttcttaagacagaagatgaaatagaattgctccgtcagagtaacctgcttgtcggtagaactctagctgaggttgctaaagtggtgaagcctggtgtaactacacgtgagttggataaagttgctgaagaattcattagagataatggggcaactccaacttttaaaggattcccgaatcaatatggagacccgtttcctgcatccatctgtacttctgtaaatgagcaggtagtacatggaatcccgggggatattgttctgaaagacggcgatatcgtatctgtggattgcggaacttatatgaatggtttttgtggagattctgcttatactttttgtgtaggagaggtagacgaagaaattcgtaacttgttgaaggtaactaaagaagcgttatatatcggtattcagaatgcagtacatggaaaaagaatcggagatatcggatatgctattcagcaatattgtgagtctcattcttatggtgtagtgcgtgagtttgtcggtcacggcatcggtaaggaaatgcacgaagatccccaggtacctaattatggtaaaagaggatatggtcctttgatgaaaagaggtctttgcattgcaattgagccgatgataacgttgggagacagacaagtgattatggaaggtgacggatggactgtgaggaccagagatcgtaaatgtgctgcgcactttgagcatacggtagctgttggagctggtgaggctgatattttgtcttcattcaaattcatagaagaagttttaggagataaagcaatataatatggcaaagcaatctgcaatagaacaagatggagttatagttgaagcattgtctaatgcaatgtttcgtgttgaattagaaaacggacatgagattactgcacatatttcaggtaagatgcgtatgcattacatcaagatcttgccgggagataaagtgagagtcgaaatgtctccttacgacttatcgaaaggaagaattgtgtttagatataaataaaattaagatatgaaagtaagagcatcattaaagaaacgcacgccagaatgtaagatcgttagacgtaatggccgtttgtatgttattaacaagaaaaatcctaagtataaacaacgtcaaggataatttgttatttttgcaaaaaaaataatttagtatatggctataagaatagttggtgtagatttacctcagaataaaagaggtgaaattgcgttgacctatgtatatggaataggtcgcagtagttcagcaaaaattttagataaagctggtgtagataaagatctgaaggttaaagactggacagatgatcaagctgctaagattcgtgagattatcggtgcagagtataaagtagaaggtgatcttcgttctgaaatccaattgaacattaagcgattaatggatattggttgttaccgtggtgtacgtcatcgtattggtctgccggttagaggtcagagcactaagaacaatgcacgtactcgtaagggtagaaagaaaaccgttgctaataagaaaaaagctactaaataataattgttgatatggcaaaaaaaacagttgcagctaagaagagaaatgtgaaagtagacgctaatggacagttacacgttcattcatctttcaacaatattattgtttctcttgcaaacagtgaagggcagattatctcttggtcatctgcaggaaagatgggatttagaggttcaaaaaagaatactccttatgcagctcagatggctgcccaggattgtgcaaaaattgcatttgatcttggcctgagaaaggtaaaagcatatgtgaagggtccaggtaacggacgtgagtctgctattagaactatccacggagctggtattgaggttacagagatcatcgacgtaactccgcttccacacaatggttgtcgtcctccgaaaagacgtagagtttaatttacctttaacttaaaatgatcttgattttgtttttggattgcaataatttcttctctgcaatcgcggctgcaacaaattgagttcatgaataaacaattaaatatttaaaagaaatggctagatatactggaccaaaatcaagaatagcccgtaaattcggtgaaggcatctttggagctgataaagttttgtcaaagaagaactatcctcccggacaacacggaaattcaagaaaaagaaaaacttctgaatatggtgtgcaacttcgtgaaaagcagaaagcgaaatacacttatggagttttagaaaaacaattccgcaatttgtttgaaaaagccgctaccgctaaaggtattaccggtgaggtgcttcttcaattgctggaaggccgtcttgacaacgtagtattccgtttgggtattgctcctacacgtgctgctgctcgtcagttggttagtcacaagcatattactgtagatggtgaagtggtaaacattccttcattcgcagtaaaaccaggacaattgattggtgttcgtgaaagatctaaatctttggaagtaattgctaactctcttgcaggtttcaatcacagcaaatacgcttggttggagtgggatgaaacttctaaggtcggtaaaatgttgcatatacctgaaagagcagacattcctgagaacattaaagaacatttgatcgttgaattgtattctaaataataattaatttcatggcgatattagcatttcaaaaacctgataaagtattaatgttggaggcggactccagattcggtaaattcgaatttcgtccgttggaaccggggtttggtattaccgtaggtaatgcattacgccgtatcctgctctcttcattagagggttttgctatcactactatcagaatagatggtgtggagcatgaattttctagtgtacctggagtaaaagaggatgttaccaacattatcttgaatctgaaacaagtgagattcaagcaagtagttgaagaattcgagagcgaaaaagtgagcatcactgtcgagaattcaagtgaatttaaagcaggtgacataggtaagtatttgactggatttgaagtgttaaatccggaattagttatttgtcatttagattctaaggcaactatgcagattgatattacaattaacaagggtcgtggatatgttcctgctgatgaaaatcgcgaatattgcacggatgttaatgtaattccaatcgactctatttatacaccgatacgtaatgtcaagtatgctgtagaaaacttccgtgtagaacagaagactgactacgaaaagctagtgcttgagattagtaccgacggttctatacacccgaaggaagcgctgaaagaagctgcaaaaattctgatctaccacttcatgttgttctctgatgagaagatcacgcttgaaagtaacgatactgatggcaatgaagagtttgacgaagaagtattgcatatgcgtcagctgttgaagactaagcttgttgatatggacttgtcagttcgtgccctcaactgtttgaaggctgctgatgtagaaactctcggcgacttggtacaattcaacaaaactgacctgttgaagttcagaaacttcggaaagaaatcgcttaccgagcttgatgatttgctggaaagtctgaatctatcgtttggaaccgacatttctaaatataaattagataaagaataaaaaatgagacataataaaaaattcaatcatttaggtcgtactgcttctcacagaagcgctatgttatctaacatggcttgctccttgatcaagcacaaaagaatcactacgactgtggcaaaggcaaaagctttgaagaagtttgttgagcctttgattacaaagtctaaagaagatactacgaattctcgtcgtgttgtatttagcaacctgcaagataagattgcagtaacagaattgttcaaagaaatctcggttaagattgctgaccgtccgggtggttatactcgtatcatcaagactggtaatcgtttaggtgacaatgcagaaatgtgtttcattgagttggttgactacaatgaaaacatggctaaagaaaaagttgctaagaaagctactcgtactcgtcgttctaagaagagtgctgaagctgctgctcctgctgctgttgaagctcctgcaactgaagaaccaaaagctgaatcagctgaataattttaaagttattcgtatacatataaaaaaggctactcacacgggtagccttttttgtatctttatattttagttatactaagatacattaaaagatttaccgaatgaacttttcgtaagaattatctgttatatttgcaggagaatatggcaaaatttgtaaaggtaatattgtttctgttgctggcagttgcccttcatggggtcgcaggcaatgttttcactgaaaagcaggtggaacaaccagagcatgctgttacatattctatgaaaccgcaggggcagattaatgctccagaatctccttatcttcctgtggctgaattaactaatttgcaaagccatcagatatcggtgacacgcatccaacgtgtgcaaatcggtgaatacttctcttctctgagaaatgtgctgcaatgttgtgcagaccgtgataactcgctgtcacagcattggggaaggatttataatactacaacttcctattattgccagcctgcaagtgaatattatgtatttactttaaggcatattattatttagacgtttatttattggtattattttacggattgctggcgttaattatatagtgccggtcagtctttattatcttcatatttttactaataatttaaacttcaatattatggcaactcaagctattgatgctactatatttgcatcttcacatcccgatatcgctaaacgtacgagtatctccggtcttttaatttcttgtgtaatgttactgattggtattttatcttttgcttctacttttgaactggaagataaatcgtctactgtcagtatggctctgatggtctttggaacaggattgttccttttaggtatattccggcttttctggaagtcaaaagaagtggtctatgtaccgacaggaagcatagcgaaagagcgtagtattttctttgatctgaagcatatggacaagttgactgaccttgttaattccggttcattttctgcggattcaaagattaagagtgaggcaagtggtaatatacgtatggacgtgatactatctgctgataataaatttgcagctgtacagctattccagtttgtaccttatacatatcagccggtgactgctgtgcattattttaccaatgatgcagctgcagctgttgctgcgtttctgactaaaagtcaattgaattaaagtgcttaatgccaaatggtattcatgttgatggcgaattgtcattcatcagaagatcatttctaagatagtcaagtgcagggatgcagggataaatggataatggattgataattactgaatatcgcacttctatgtcttaatagcttagatacaagcaggctttaaggaataatttgacatgtggggattaaccgtcgatgacggcaatccccatttttttcattaagaagcacgcattcatgttctgtgcgactccgcttctcatctggtatgaaaatgtcagttcgttgttggtaatgtccgcttcgaaacaataattccggatattttgtggaaaagcatctattagtgtgcctagcagtaggtcatgagtagcgataataccattggcatccatgctcatgaactgtttgattaaggcaaaagaacctttctgtttatccatagagttagttcctttcagaatttcatcaaggatgataaataattcttctccggctttgagtttatcaatgattagtttcagtcgtttgagttcggcgaagaagtaagattcattgtcggtgagtgaatcacttgtccggaggctggtgacaagacgagcgggaaatatttccattttcgcagcccatacaggagcaccaatgcaagccaagaggtagttgacacctacggtgcgcaggtaagtacttttgcctgccatgttggcgccggtaataatgataaagaacgggcgtttctccatatcgattccattgcggacacatttattgcggtccatgagcggatgccctaaggcttcggcttgcagatggaaagactgagaagttatttgaggatagatgtaatccggatggttgtatgagaatgttgcaagagaacaataagcatcaattgctccgatagcttcgatccagcggggaagatctgcggagtgtgcttctttccatttctcgatttgcatgacttggcggagttcccaaaataggaggccgttcaagatggtgctcattagcagattacctcgctggtcgagtgcattcatgagtttagcaaggcgatgtacggactgggaagctgtttgattttggcttgtaagttcggctttcagttgttgcaatgcagggctgtgcatctcttttttctcggtgatgagaatctggtcggcgtaagtagacagaatttgtagtttttcgccatacgtcgcttgtattttggttattccttttgagaagataaaactgaatacgacaaagcatgcaaatactatcccgctgatgcttgcagggagaaatcccagtatcgttgcgccgatacacaggaggtttataatacctactgctgtcgggaggatacggaggaaagcgtgtttccgatagtcgctcggactgttgacccattctttaattgcagaggtgtcggatggcttgcctttataaagtaatccgagcaggcggaattgttgtcgaaactcaagttctgaagatagttcccgaatcgcttcctgacgttgttcgatagcttctttttcttccagatgtgcattgaaccagttggcaagacgctgtttgccgatgggggtcgaagtacgattgatatactggaatagtgagtgttcgccaaatatgtccaagtcgaaagtatagaggtgagacggatcgatgtattcctttccgttgtcgaagtcggaaaagtcatattgcagtgctcgtagttcctgctgattgatttctattttctttttgagataatctttccagtaaaaccatcggttgtggctttgcaccagccaaatgaaagcgatgatgggaagtacggtaagtacgatgagttttaaccatccgtcggaccaaaaaataatggcggaggctactgcttctacgaataagatcagtctcagaaggctgatatagcgaatgcgtttccgcgctttttgtagttgtttttctgtttcctgaatgatttgttgataggttgctataatattttcttgtttttccatacgattatattgcttttcggacaaaggtaatataattcgtaaaaggcagaatgggagcgtgtttttgtaaagagcagatttactctttattaacggtcattcagtaatcggtgatgaagcaagttgtgatggtttagagtaaagttacataggaaataaacacactttgttattgtcacttgtcacctttgcgtgataagtgtctcataattagtcaagtaatggtgataataaccggtgataataaggtgataatagatgtttttctgctttctattatcacctgtttttaatagataatacggttaatttgctgattatcagtggtaagcgcactgttttaaagcctttggctatttatgttaagaactcccttttaggcatgaatgtacgttgtttataccatatattacttcctgtatgccgcctatattaagacaagactcggcaaccttaacctgtaaacaaggtttgactaatatattttgttcgtttcatattttcgtttcacgtccgtgatctgttcggtttacgtatgtgagctcaatagtttacgtacgtggactgatgggagcatgtacgtgaaacgatttattgttactgacggaatatattaatcatgcctgcataatagcataatgaatcgttcatttgctgttgttcccgggagcttattctttcatagttgatatggggctgactaaaaagtcggtagtatcttaaatcttctccttcccgaagggaggggaattggagatactaccgactttttagtcaaccctgacgactcaggtattaacgcctgatattccggatgaaaaaagacaagataagattataaaaagaaccataaaccgtatttcatgagtaaacaaacttcggggacgattgacttgcttccgggataattgtgtgtaagaggtgctgtgccaagaaggcgaaaggggcttcttggcttcttttttcaacatttctttttccattcttgcatttatgcgctaaaatttataactttccactcgaaaaggcgttgaatgaagaaaggaggatggcttatgaagaaaggatatattttgtggttgctgataagcgtgattagccttccggtagttgcgcagaatatcatttattcaaacttgaaagagttgatggttcaagatggcgatacccttgcagtgttgcgagtagagaagcgttccagaagccagattctattgacaggcggggctgactaccggataacggcaggcaatgatgaatctatgtgccgccagttgaagaagcgttgttttgcggtgcgtacttctgaaggagacttatttatcaactgtcgtaagttgcgttataaaaagatgcgtttcggggcgtggtatgctccggctgttcagttgggcaaaaatatctatttctgtgcgatgccattagggtcggtaatcggtgggacatttgcagaagaagatgatgtgaaactgggcggaaatgtgggagatgctcttgctgcttcaagtctggttactaaacgggtctgctatgagctgaacggtgagaccggaaagattgattttgtaggaagagaaaagatggcgcaactgctggaaaaacatccggaatggaaaaaagcctaccttacaaaagacagtcaggaagcgaagcataccttcaagtatctgcaaatgctgtgtggtgagcagcagaaagaataaataatacctttctgataataaatctaccaaaacctttgtcttttctcttctttttttctatattgcgaagagttatagaactgtattgcttacagtttgtaatccttaattctgcttattatgaagataactcttggcaacacgttacctccctacccagctttcatagaaggtatccggagggcccccgaccgtagttatatgcttacgccggcgcagacagctacggcattgaagaatgcattgcgctatatccccttggaattgcatgagcaactggcacctgaatttatggaagaattgcgtacccgtgggcgaatttacggataccgcttccgtcccgcaggcgatctgaaagccaggccgattgatgaatatcgtggcaaatgtgtggaaggcaaagcctttcaagtaatgattgacaacaatctctgttttgatatcgcgttgtatccctatgaacttgttacttatggtgaaaccggccaagtttgtcagaactggatgcaatacctcctgatcaagcaatatctcgaagaacttactcctgagcgaacactggtcattgagtccggacatccgttgggactgtttcgttcccgtcccgatgctccccgcgttattattaccaactctatgatgataggtcagttcgacaatcagcacgactggcacattgccgcacaaatgggagttgccaactatgggcagatgacggcgggcggctggatgtatatcggtccgcagggtattgttcatggcactttcaatacattactcaatgccgggcgattgaaactcggcattccgcaggacaaagatttgcgtggtcacctcttcgtatcttccggtttgggaggaatgagcggggcacagccaaaggcagccgaaatagccggagcagcctctattatagccgaagtcgatagctcccgtatcgaaacacgttatcggcagggatgggtaggccatgtcacacaggacctgtcggaagctttccgcctggcaaaagaagcgatggaacgtcgggaaccttgctcgatagcctatcatggcaacgtcgttgatttgctggaatatgcggaacgcgagcagattcatattgaacttttgtccgatcaaacctcttgtcatgccgtttacgaaggaggctactgtcccgcaggcttgactttcgatgagcggacccgccttcttcatgaatctcctgatcagttccgtcgtctggcagacgcttctttgcgccgccattttgaggtaatccggaaactggtggcatgcggcacttacttcttcgattatggcaactcctttatgaaagcgatttatgatgccggagtgaaagagatttcccgcaatggagttgatgagaaagacggatttatatggccgagttatgtagaagatatcatgggaccccaactctttgattatggctatggccccttccgatgggtatgtctgagcggtaggcacgaagatctgataaaaacggaccgtgccgcaatggagtgcattgatgtcaatcgccggggacaggatctggataattataactggatacgcgacgccgaaaagaacaggctggtagtaggtactcaggcacgtattctctatcaggatgccgtaggaagaatgaatatcgccctccgtttcaatgaaatggtacggcggggagaagtaggaccgatcatgttgggccgcgatcatcatgatgtgagtggaaccgattcgcctttccgtgagacatcgaatatcaaagacggaagtaatgtcatggctgatatggccgtgcagtgtttcgccggaaactgcgcgcgtggcatgagcttggtagccctgcataatggcggcggagtcggtatcggaaaagcgattaatggcggcttcggcatggtatgtgacggcagcgaacgggtagacgagatacttcgctcggctatgctttgggatgtgatgggcggagtggcccgccgttcgtgggcccgcaatctgcatgcaatggaaactagtgacgctttcaatgaatcacattcggaagggtatcatataacgatgccttatctggctgatgacgagctgattaaaaagacaataaaagaagcattgtaatagaaagtaacgaaatagagaaataaatatgaattggagtaagatcatcgaatgtgtccccaactttagcgagggacgtgatttggagaaaatagacaagatagtagccccttttcgtggcaaatccggcgtgaagctgctcgattatagcaatgatgaagatcataaccgtctggtagtcactttggttggcgaaccggaagccttgcgcgatgcagtcattgaagctatcggcattgctgtccgtctgatagaccttaatcatcatagcggacagcatccccgcatgggagcggtggatgtggttcctttcattccgatcaagaatacgacgatggaagaagccgtcgccctgtcgaaagaagtggcttcccgggtggcggaactatataatctcccagtctttctgtatgaaaagtccgccacagctccgcatcgggaaaatctggcctccgtccgtaagggagaatttgaaggaatggcggagaaaatcagacttcccgaatggcagcccgacttcggtcctgccgagcgtcatcccactgccggaacggtagctatcggtgcccgaatgccgctggttgcttataacatcaatctgagtaccaataatcttgaaatagccacgaagatagcaaagaatatccggcatatcaacggcggtctccgctacgtcaaagcaatgggggtggaactgaaagagcggaatatcacccaagtatccattaatatgaccgattacacccgcaccgccctttaccgtgctttcgaattggtgcgtattgaggcccgccgctatggagtgacgattgttggaagtgagatcattggtctggtgccgatggaagcgctgatagatacggcctcctattatttaggactggagaatttctccatgcagcaggtgctggaagcgcgtatcatggaatagcgcccggagtattaaaataatgtgcgtccgatataaagctgctgaaacttatatcgaattatgattgaaatagtaagaaccgaataataaaagatcaatgagtgaaaacctgattatattcaatgcccgtattgtcaccccgacaggaatctccgcccgtaaaggtgcggaaatgagacaactccgcatcatagaaaacggaacggtagaagtgaccaaaggcatcatcacttacgtcggcgagagtcgtggcgaagatcgtgacggctactaccagcattactggcattacaacgcccggggacattgcctgcttccgggctttgtcgattcgcatacccattttgtttttggcggagaacgttccgaagaattttcatggcggctgaaaggcgaaagctatatgtccatcatggaacgtggcggagggatagccagtaccgtaaaagctacccggcaaatgaatttcctgaaacttcgctcggcagccgaaggctttctgaagaagatgagtgctatgggagtcaccacggtagaaggtaaaagcggttatggactcgatcgggaaacagagctgctgcaactgaaaataatgcgcagcctgaacaatgacgagcacaaacgtatcgacattgtatccactttcttaggagcccacgcccttcccgaagagtataaaggaagaggagacgaatacatcgactttctgattcgtgaaatgctccccgttatccgcgagaacgaacttgccgaatgttgtgatgtcttttgcgaacaaggagttttctctgtcgaacagtcccgccgcctccttcaggcagccaaagaacaaggcttcctgttaaagctccatgccgatgaaatcgtttcctttggtggcgctgagctggctgccgaactgggcgctttgtctgccgatcatctgcttcaggcttccgatgccggaatccgtgcaatggccgacgcaggagtagtagctaccctgctgcctctgacggctttcgcactgaaagaaccttatgcacgcggtcgtgaaatgattgatgccggctgtgccgtggcacttgccacagacttgaatccgggaagctgtttctccggttccatcccgttgaccattgctttggcgtgtatttacatgaaacttagcatcgaagaaaccatcactgcccttacactgaacggagctgctgcccttcatcgggcagaccggatcggaagtatcgaagtaggcaagcaaggtgactttgtcatactgaattcggacaattatcacattctgccatactacgtaggcatgaactgtgtcatcatgactattaaaggcggtatgctataccccgtcaattgataactaaaagcataaaataccatgttagcagatttaaccgtaaaagatttcttagataaggtagccggcaatgatccggtacccggcggtggcagtattgccgctttaggtggagcgctggcttccgctttggccacgatggtgacaggactcaccatcggcaagaaaggatatgaagccagcgaagaagtaatgcagcacgcacagacgcttaccacccgattccaaaaagaattcatcgccttgattgataaagactccgaagcctatgatgaagtttttgcctgttttaaacttcccaaagctaccgatgaagaaaaagctgcccgcagcgctgccattcaggaagccaccaggcatgccgccctcattccgatggaagttgcccgaaaagcactcgaagtgatgcccgtcatagcagacatcgcccgtctggggaatcggaacgctattacagacgcttgtgtagccatgatggcggcacgatccgccgtattgggggcattgctgaatgtccgcattaatctgggggtactcaaagacaaagaatttgtcttgggattgcaagccgaagcggaccggatggagcaaaccgcttgccggaaagagaaagaattactggatgccgtcaaccaagacttacgtgtatgagcaagaatgtgtatcaaataggttccggagaactgaccttcgaaatcatcgaacggatcatcaacgagaatctgaagctggaactggctcccgaagccaagctccgcattcagaaatgccgtgattatctagaccataaaatagcttcttccgaagaacctctttatggcatcaccactggcttcggctcattatgcactaaaaatatttcttccggcgaattgggaaccttgcaggaaaacctgataaagagccatgcctgcagtgtaggcgaagaaatccgtcctgtcatcatcaaactgatgatgttactcaaagcccacgctctctcgttgggacatagcggcgtgcaactaatcaccgtacagcgtatcctcgactttttcaataacgacgtactgcccatcgtctatgatcgcggttccttgggagcttccggcgatctcgccccattagccaatctgttccttcctttgatcggtgtgggcgacgtcaactataaaggaaagaaatgcgaagcaatcagcgtgctcgacgaatttggctgggaacccgtccggctcatgagcaaggaagggcttgcactgctcaacggtacccagttcatgagtgccaacggtgtatttgccattctcaaagctttccgcctttccaagaaagccgacctgatagctgctctttctcttgaagccttcgacggacgcatcgacccgtttatggattgcatccagcagatacgccctcatcccggacagatcgagacaggagaggctttccgtaaactgctggcaggcagcgaactgatcgaacgtcccaaggcgcacgtacaggatccttactctttccgttgcatcccgcaagtgcatggtgctacgaaagacgctatccgctatgtttcctccgtactgctgaccgaaatcaattccgtcacggacaatccaacgatcttccctgacgaagacagaatcatttccggtggaaatttccacggtcagccgttggctatctcctatgactttctcgctattgccttggcagaactgggaaacatttccgaacgccgtgtctctcaattgattatgggacttcgcgaacttccggagtttttggtagccaatccgggactgaattccggttttatgattccccaatatgctgctgcgtctatggtcagccagaacaaaatgtactgttatgccgcatcgagcgattccatcgtttcgtccaacgggcaggaagatcatgtaagtatgggagccaatgccgcaaccaaactttataaagtgatggacaaccttgaacatatccttgccatcgaactgatgaatgctgcgcagggcatcgatttccgccgtccgctgaaaacgtctccgctgctggagagtttcctgcatgcctaccggaaagaagtgccttttgtgaaagatgacatcgtgatgtataaagaaatacataaaacagtcgcttttttaaaaaggactaagttagagtactaaacctcctttttcgcttttcgttaataatggtgactgttattgccggataaacgatcgattcttatcggtatttatccggcatttgccgattattctccctcttacagcgataaaactttacttcatatacctctattccttacttttgctctatatttcctcttaacacttgttttcatatacctctaatgaatgataatatttatcaaatgggctataaataaaaggaaacttgatttgttaattgagttttctatatatctttgttccgtttttcgctttaaatggtgaatttatagaaaactgagtctaacaaaatctaaaaagagtgatgatggagcatggaagagacgcgtcccaaaaggcggagctgagagaacggattataatgaccgcgacagaagcttttactttgaaaggtatcaagtgtattacgatggatgacattgcggcagcattgggcatttccaaacgtacgctctatgaggtttttgcagataaggaatcattattgaaagagtgtattctgcaaaagcaagctgaaagagacaaatacttgcaggagatatacgagcaatccaacaatgtgctggaggtgatacttgctgtctttcagaaaagcatcgagatctttcatcagaccaacaagcgcttcttcgaggatatcaagaaatatccgaaggtatatgcgatgatgaaagaccgtagtgaaagtgactcggagaagacgatgtctttctttaagtcgggggtagagcaaggtatctttcgggcggatgtcaactttgagatagtcaatctgttggtgcgcgagcagtttgatgtgctgttgaatacggacatttgcaacgaatatccttttatagaagtatacgaatccatcatgtttacctatatacgtggcatttccacggaaaaaggagccaaagttttagaggaatttatatcagaatatcgtaaaaaccgggtcgagcaacaataggagctaggttcggatgacaaacaattaaggatcaaatagaaacgagtttatgaacagattgaaaagattgacaggcaagaaaatgcttctgacggcaatggctctctgtgcgtttggctttgcaaaggctcagacggagcagacaacgcagaatacgctgacattgacgctggacaaagccctggaaatagcgttggatgagaatcctacgataaaggtggcggcagaagaaattgccttaaagaaagttgcaagtaaggaagcgtggcagagcctgttacccgaagcaagcctaaacggatcactggatcacacgatcaaagcggctgaaatgaaactgaacgatatgtcgttcaagatggggcaggatggtacgaataccgccaatgccggactgagcattaacctgcctttgtttgcaccggcagtctaccgggccatgtcaatgacaaagacggatatcgaactggcagtggagaagtcgcgtgcttccgaactggatttgatcaatcaggtaaccaaggcttattatcagctgatgcttgcacaagatagttatgaagtgcttcaaggcagctataagttggcagaagataatttcaatgtcgtgaacgccaaatatcaacaaggtgcagtcagcgaatttgacaagatcagcgcagaagtacagatgcgcagcatcaagccgaatgtcatttctgccgccaatgccgtgacgctggcaaaactccagttgaaagtgttgatgggcattacggctgatgtggatattaagactgacgataatctgacaaactacgaatcaatgctgtttgccaatcagttgaaagaagaagatatgagtctggagaacaatacaacgatgaagcagttcgagctgaatatgaaattgctcgaaaagaacgtgaagtcgctgaaaacgaacttcatgcctactttgtcgatgagcttctcttatcaatatcagtctttgtataatccgaacatcaatttctttgattatacgtggagcaacagttcgtctttgatgttcaatctgagcattcctttgtatagggcgagcaactttacgaaggtaaaatcggcccgcatccagatgcgccagcttgactggaaccgtatcgatacggagagaaaactgaatatgcaggtagtcagctaccgtaacaatatgactgccagttccgagcaggtggtcagcaacaaagaaaacgtgatgcaggctgaaaaagcggtacagattgccggaaaacgttatgaggtaggtaagggaaccgtgctcgaacttaacagttcgcaggtatcactgacgcaggcacaactgacttacaatcaatcaatctacgattacctggtatctaaggctgaccttgatcaggttttgggaaaacaataaagatagacaactaaaattacaactaaggaatatgaaaaaaggtatccaattagtggctctgctattgacagtagtaatgagctcatgtacgggtggaaaagataaggctgctgtgaaacaggaagacgagaagcccagagtaaaagtggctgatgtaacagcccgtcccgtagatcagatacaggattatacagcgacggtagaagctgaagtaaagaacaacattgctccttcgtcacctgtccgcatcgaccggattctggtagaagtgggcgaccgtgtatccaaaggccagaagctggtgcagatggatgcagccaacctcacacagacgaaactgcaactggacaatcagaaaattgaatttaatcgtatcgacgaactttataaggtaggcggtgcttccaaatcagagtgggatgctgcgaagatgcagctcgatgtgaagcaaactgcttatgataatctggtagagaatacgtttctgttgagcccgatcaacggagtaatcactgcccgtaattacgataatggtgatatgtatagtggcggaagtccggtgctggtagtagagcagatcactccggtcaagctgatgatcaatgtgtctgaaacctacttcacgaaggtgaagaaaggcgaaccggtagatgtgaagctggatgtatatggcgacgaactgttcaagggaactatcagcctgatctatccgactatcgacgcaactacccgtactttccagatcgagatcaagttggacaacaaagatcagcgtgtacgtccgggaatgtttgcccgtgctaccttgaacttcggtacggcggacaacgtcgtagtacccgacttggctattgtgaaacaggcaggttccggcgatcgctatgtgtacgtttataaagatggtaaagtgtcctacaacaaagtggagttaggcagacgcatgggctcggagtatgagctgaaatccggtgtgcccgataactcgcaggtggtagtggccggacaggcacgtctgataaacggtacggaagtagagatcgagaagtaaaatcactattaaactaatcactataaagaaatgagtttatacgaaggtgcggttaagaaaccgattatgacctccctctgctttctggcagtggtgatttttggtcttttctctttgtccaagttacctatcgacttgtatccggacatcgatacaaatacgatcatggtaatgaccgcatatcctggcgcaagtgcttcggatatagaaaataacgttacccggccgctggagaataccttgaatgcggtgagtaacctgaaacatattacctctcgttcttccgagaatatgtcattgattacattggagtttgagtttggtaatgatattgacgtgctgacgaatgatgtacgtgacaaactcgacatggtaagctcacagctgccggatgatgtcgagaatccgatcatcttcaagttcagtacggacatgattccgattgtattgctttcggtacaggccaatgagagccaggccgcgctttacaagatactggacgaccgtgtggttaacccgttggcacgtattcccggtgtgggaacggtgtctatcagtggtgcgccgcagcgtgagattcaggtatattgcgaccctaacaaactggaagcttataacctgagcattgaaactatcagctctattatcggagccgaaaacaagaatattccgggcggtaacttcgatatcggtagtgagacgtatgccctccgtgtggaaggggagtttgatgattcccgtcagttggcagatatcgtagtaggtacgcacaatggagcgaatgtcttcctgcgtgatgtggcccgcatcgtggatacggtggaagagcgtgcgcaggaaacctataataacggtgtgcagggtgcgatgattgtggttcagaagcagtcgggcgccaactctgtagaaatttcccgtaaggtagaggaagcgcttccgcgtttgcagaagaacctgccgagtgatgtgaagctgggagtgattgtcgatacttccgataatattttgaatacgattgacagtttggcagagactgtaatgtatgccttgctgttcgttgtgatcgtcgtgttcctgttcctgggacgctggcgtgcgacattgattatctgtatcacgattccgctttcgttgatcgcctcctttatctatctggcgattaccggaaatacgatcaatattatctcactgtcgtctctgtctattgccatcggtatggtggtggatgacgcgattgtggtacttgaaaacgtgacgacacatattgagcgtggctcggacccgaaacaggcagcagtacatggaacgaatgaggtggctatttccgtaatcgcttctacgctgaccatgatcgccgtgttcttcccgttgaccatggtaagcggtatgtccggtgtgctcttcaaacagctgggctggatgatgtgtgccatcatgtttgtgtctaccgtcgcggctctgtcactgaccccgatgctctgttcgcaattacttcgcctgcagaagcgcccgtcgaagatgttcaagctcttctttactccgatagagaaagcgttggacgcactcgatacaggttatgcgaaaatgctgaactgggcagttcgtcatcgtccggttgtgattgtgggatgtattgctttcttcgttgtcagcttgctgtgtgcgaaaggaatcggtacggagttcttccctgcacaggacaatgcccgtattgctgttcagcttgaattgccgatcggtacacgaaaagagattgctcaggaactttccgagaagctgactaaccagtggctgacgaagtataaagatatcatgaaggtatgtaactataccgtaggtcaggcggactcggataatacgtgggcttccatgcaggacaacggctcgcacattatttccttcaacatcagtctggtagacccgggagatcgtgatatctcactggaagcagtctgtgacgagatgcgtcaggacttgaaaggttatccggagttcagcaaggcacaggttattctgggaggtagtaatacaggtatgtctgctcaggcaagtgccgactttgagatatacggatacgatatgacgatgactgatagcgtagcagcccgtttgaaacgtgagttgctgaccgtgaaaggggtgaccgaggtgaacatcagccgtagtgactaccagcccgagtatcaggttgatttcgaccgtgagaagctggcgatgcacggactgaacctggctacagccggtaactacttgcgtaatcgtatcaatggtgccgttgcttccaaatatcgtgaagatggagatgaatatgatatcaaagtgcgctatgcacccgaatatcgtacaagtctggaaagcatcgagaacatccttatttataatgccaaaggcgagtccgtgcgtgtaaaagatgtcggaaaggtagtcgaacgttttgcgcctcctaccattgagcgtaaagaccgtgaacgtatcgtgaccgtatccgccgttatctccggtgctccgttgggtgacgtagtggcagcaggtaacaagcttattgataagatggatattccgggagaaatcacgattcagatttccggttcgtatgaagaccagcaggattcgttccgcgacttgggaacattgggtatcctgattgttatccttgtattcatcgtaatggcggcacagttcgagtctctgacttatccgttcattatcatgttctctctgccgtttgcatttagtggagtcttgatggcgttgttctttacgggcagtacgctgagtgtaatgagtttgctgggaggtatcatgctgatcggtattgtggtgaagaacggtattgtgctcatcgactacatcacgctctgtcgagagcggggtatggcggtcatcaactctgtggtgacatctggtaagagccgtctccgtccggtattgatgacaacagctactaccgttctgggtatgatcccgatggctatcggtggcggacaaggttctgagatgtggagtccgatggcgattgccgtaatcggtggtctgacggtatctactgtgttgacactcgtcctgattcctacgctgtactgtgtatttgccggaacaggtatcaagaacagacgtcgtaaactccatcgcaaacgcgaactggatgtctacttccaggaacataaagatgaaattattaagaaataacagaaaagaaatatgaaatcagtattgataacattcgatcaggcgtattacgaacggatcatggcattgctcgaccgtctgaactgccgtggctttacataccttgaaaaggtgcagggacgtggctcaaagacaggcgatccgcacttcggtagtcatgcctggcccagtatgtgttcggctatccttacggtggtcgatgacaataaagtcgatccgttgctggatacactgcataagatggacttgcagaccgaacagctgggattacgtgcatttgtatggaatattgaacggaccatctagcgttcgaacagtgaataaataatcggaagggagaatctataaataatgtagattctcccttcttttttcttgcttttccctatctttgcagcctgaaaacgtccggcaccgatgaacttgtggtccggcaccgatgaggccttccttcggcaccgatgaggaggtggctcggcaccgggtaaaaaacgaggactcaatgagtgcttatatctacttataagatggagattatcaagaactacctgaaatattcgttatggcttgtactgatcgtgtttgcagcactctttgggttgcactggcttccggctataacgatcgacggacacacgatgaggcgtgtcgatcttttaagcgatcttcgctatccgaagcaggaagtggcggtagccgattcggataccattcctttgcctcctgtcgtaaagccggtttttgtcgatacttgtcgtgcgggcatgacttgcattgaagattacggtgactctacccgtcgcggtatggcttctttttatgaagcgctcgaccgtacttcttcttcacatccggatcatgacgggctggtacgtatcgccgttttcggtgattcatttatagaggcggatatctttacggctgatttacgtgaaatgcttcagaagcggtttggcggttgcggtgtcggatttgtcacaataacttcgatgacgagcgggtatcgtcctaccgtgcggcatactttcggcgggtggtccagtcatgcggtgacggacagtgtgtatttcgataaaaagaaacagggtatttccggacattactttattccccgtgaaggagcatacgttgagttgagggggcaaagcaaatatgcttcgctgcttgatacctgtcagcaggcttcgattttcttctataataaagattccgttcatcttactgcccgtgtgaatcggggggagagtaagaattattccttagcgccttcgggcgatttgcagaagatttccgttgaaggacgcatcggctctgtccggtggacggtagatcgtgccgattctacgttgttctatggcttggcgatggatggtaagaaaggaatcattcttgataatttctccttgcgaggcagttccggcttatcgttgcgggggattccgcaacaaatgctgcgtcagtttaacgagcagcgtccttatgatctgattattcttgaatacggattgaatgtggctaccgaacggggacgcaattatgataattatcagaagggactgctcacttctatcgaacatctgaagaattgttttccacaggcgagtattttgctgttaagcgtcggcgaccgtgattataagacagaagatggtgaacttcgtaccatgccgggagtcaagaatctgattcgctatcagcagaacattgctgccgaaagcggtatcgctttctggaatatgtttgaagcgatgggaggcgaaggcagtatggcgaacctcgtacacgccaaaccttcgatggcgaactacgattatactcatatcaacttccggggaggcaaacatctggcaggactgctctatgaaacattgatatatggtaaggaacaatatgacaggaggcgtgcttatgagcaagaataacctgttgctgggctttatcttgggactgatggcaacattctttcttctttcggcaggaaaggcgcaagaccgtatccctgcctgtcctccactggggaagaccttgaaaatgataaaacctttgcgggaaatgaactgggcgaatgataccatcgccgtgcagacttcttttccttccgctttccgcgaaaccggaaggaatgagataatcgacagcattgccctgctgacacccgtatttgaacgtctccgtcaggtacgtgccggactttccgaagatacggtgcgtattctccatatcggagacagtcacgtacgcgggcacatctatccgcagactacgggaacgctgctgaaagaaacctttggtgctgtctcttataccgatatgggggtgaacggggctacctgtctgacgtttacccatccgggacgtattgccgatattgcagccatgaagccggaactgctgattctgtccttcggaaccaacgaaagccataaccggcggtataacgtcaacctgcattataatcagatggacgaacttgtcaaactgttgcgcgacagccttcccgatgtccctattcttctcaccacgcctccgggttcttacgaaagtttccggcaaaggcggcggaaacgtacgtacgccatcaatccccggacggttacagcggcagaaacaattcgccgttatgccaaagatcatcgtctgctcgtgtgggatatgtacgatgtagtagggggcaagcgccgtgcctgtaccaactggacggaagcgaaactgatgcgtcccgatcatgtgcattatttacctgagggatatatcctgcaaggaaatttattataccaagccattattcaagcttataacgattatgtttcccattgatattgatttcagccggttaaaagaggtgcttacctacgatccgcaggcaccgatgatattcagcagtggtatcttcctttggctgtttgccgcctttatgatcgtatacaccttgttgcagcgtaagtatacggcccgtattctgtttgtgacgcttttctcttattacttttattataagagcagcggcacttactttttcctgctggcgctggtcacggtttgcgacttcctgctggcgcaatggatggaccgtaccgaaggacgctggaaacgcaaagggttggtgactctgagtttgggagtcaatctgggacttcttgcttacttcaaatataccaattttttgggaggagtgattgcctcgttgatgggaggagaatttacggcgcttgatatattcctgcccgtaggtatctcattcttcactttccagtcattaagctataccattgacgtttaccggaaagacatcaagccattgaccaacatactggattacgcgttttatgtatccttctttccgcagctggtggccggaccgattgtgcgtgcccgtgactttattccgcaaatccggaaaccgcttttcgtttctcaggagatgttcgggcgggggattttccttattctctccggtttgttcaagaaagcaatcatttccgattatatcagtgtcaacttcgtggagcgtatctttgataatccgaccctttattccggtctcgagaatctgatgggagtatacgggtatgctttgcagatttactgtgacttctccggatatagcgatatggctatcggtatcgctctgctgttgggctttcattttaatctcaactttaattctccttataagtccgcctccattactgaattttggcggcgttggcatatctcattgtccagttggttgcgcgattacttgtacatatccttgggaggaaaccggaaaggtaagttccgccagtatctgaatctgattattaccatgtttctgggtggattgtggcacggagcttcctggaactttgtactttggggaacatttcacggcatcgctttggcggtgcataagatgtggatgtccatcataggtcgtaagaaaggagaacaaagtcatggctggcgtcgtgtattcggagtcattatcactttccactttgtctgtttctgctggatattcttccgtaatgccgattttcagaactcgatggatatgttgagacagatattcaccactttccgtccgcagcttttcccgcagttgatcgaaggctactggcgcgtgtttgctttgatgctgctcggctttctgcttcatttcactccggatagttgggaaaatgctgcttgccgtggagttattcgcttgccgttcttagggaaagctctgctgatggtggctctgatttatctggtcattcagatgaagagttcggagattcagccgtttatttatttccagttttagctttctttccacactgttttgaattaaatgatagtcaatagtatcttaattctcctccttcccgaaggaggagaatggagatactaccgacttttgggcatccccaatggagatactactgtttgattcatttttaaacagttgtgaacaaatctctatgcaatctgtattttagtctatggacgtgtgtggtattttgcgctagctttgccacgaacagataaatagacgtactatgagatatagaatcctctttttctttttggcttttatcggaataagccagttcgtgacatcgtctgatgtccgtaataaatataatttcaattcagactggttgctttatgtgggcgatgttcccgaggcaaagcagccgcgtttttctgattcggagtggaagaaagtgactttaccgcatgccttcaatgaagatgaggctttccgcctgagcattgatgaactgaccgatacgattatgtggtatcggaaacatttccgtctgcctgccgacagcaagaataagaaagtttttgtagagtttgaaggagtccgtcaaggggcggatttctatataaatggtcagaatgtcggcctgcacgagaatggtgtcatggctgtcggttttgatctgactccttatattaagtacggacaggaaaatgtaatcgcagtccgcatcgacaatgactggaattataaagaacgggcgacgggcacgaaataccagtggagcaataagaactttaatgccaattatggcggtatccccaaaaatgtatggctgcacgtcaccgaccgtctgtatcagactttacctttatatagtaatctcaaaacgaccggagtctacatctatgccgaagacatccgtgtgaaatcgcgcaaggccattattcatgcggaatctgaaatcagaaacgaatataaccgtgataagcaggtttcctatcaagtagaactgatagaccgtgatggtacatcgatccaaacattcgaaggaacaaaggcggtagtgaaaccgggtgaaacaatcacgctgaaagcggtatccgaagtggataacctgcatttctggagctggggatatggctatctgtatacagtaaagacaagcctgtgggtagatggcaggaaagtggacgaagttgccacccgcaccggattccgtaaaacgcgcttcggtaaaggaatgatctggctgaatgaccgtgtcattcagatgaagggctttgcccagcggacaagcaatgaatggccgggagtcgggatgagcgtacctgcctggctgagcgattatagcaatcatctgatggtggagggcaatgcgaacctcgtgcgttggatgcatgtcactccgtggaaacaggatatcgagtcgtgcgaccgtgtgggattgattcaggctatgcaggcgggagatgccgaaaaagattgtgaaggacgtcagtgggaacagcgtacggaattgatgcgcgacgccatcatctataaccgtaataatccgagtatcttattttatgaatgcggcaatgagtccatcagtcgtgaacacatgattgagatgaaagtgatacgtgatttgtacgatcctcacggcggccgtgcaatcggttcccgtgaaatgctggacatccgcgaagcggaatatggaggcgaaatgctgtatatcaataagagtgcgcatcatccgatgtgggcaatggagtattgccgtgacgagggattgcgcaaatactgggatgattattcctatccttatcacaaggatggagacggcagcaattcttataagtccaccgttaccaacaaagtacagaagaaagtggatgcccgtgtctacaaccgtaatcaggattcctttaccatcgaaaatatcattcgctggttcgattactggcgtgaacgtccgggaacgggagaccgtgtaagttcgggtggcgtgaagataatcttctctgataccaatacgcactatcgcggagtagaaaattatcgtcgtagcggagtaactgacgccatgcgtattcctaaagatcctttctttgcacatcaggtgatgtgggacggctgggtagatacggaatgtcctcgcatctatatcgtcggtcattggaattataatgatacggtactgaaaccggtatatgtcgtatcgagtgccgataaagtagaattatttctgaatggtaagtctttgggcaatggtgaacgggattatcattttctgtataccttcaaagatatcgctttcgtaccgggcagactggaggccgtaggatacgacgaaaaaggaaaagaatgttgccgtactcagttgcagactgccggcaagccggaacagattcaattgagcttcatccagagtcccgaaggatggaaagcggatggtgcggatatggtactgcttcaggtagaagtcatggataaagacggcaaccgttgcccgctggcaaatgacttgatacactttgaagtagaaggacctgccgaatggcgtggcggcatcgcacaaggagaaaataattatatcctttcaaaagacttgccggtagaatgtggtatcaatcgtgctttgatccgttcgctcactactgccggaaacgtccgtatcacagcgaaggccgacggattgaagccggcagaaatcagccttacttcctcacctgtcgaagtgaaaaacggtttgagcaactatatccccggtgatgaactggaaggcaggctgactcgtggcgagactccgcagactccttcatacaaggtctcaaaagtggatgtcggtatcgtttccgccattgccggagccaataatgagagtacagtcaacagtttcgatgataatgaactgagcgaatggcggaatgacgggaaagcagctaccgcatggattacctataagttggaacgtgccgcacgggtggatgaagtctgcatgaaactgaccggatggcgtatgcgcagttatccgctggagatatatgcaggcaaagaactgatatggagcggagatacggataagagtctgggatacgtccacttggatgtaaaaccggcactgaccaatgaaattaccatccggctgaaaggtacaagcaaagaaggagatgcctttggacaaatagtggaagttgccgcccccgttgccaatgaactggatttgtttaaagcgaaggatggggacaagaccggccatgaattgcgtattgtagaaatagagttcaaggagaacttgttgaaatagttttttagggtttgtatgattggttttccaaggaccgtccatcgtactgtcagtatagtgacatcatctgtcttttttgatcggaatggagtctcctttactggcagactgaaggacgttgttctttgatctcatagagtgaatttagcaataagttggaacgttattaaaagattttctctttctttgcaataacgaaaaaacattgagccttatggattacccattgaataaccaaccggctactgatcgctacgatcgcatgcaatataaatactgtggcaagagtggcttgcaactgcctctcatctctttaggattgtggcataacttcggtagtgtagataactttagtgtagcgaccgacatgattaaatatgccttcgaccatggcatcacccatttcgatcttgctaataactatggccctgtgccgggaagtgccgaaactaatttcggacggattctcaaagaaaacttccagggataccgggatgagatgataatctcctccaaagccggacatgatatgtgggcaggaccttatggcggtaacagttcccgcaaaaacctgatggcaagcatcgatcagagtctgcgccggacagggctggagtattttgatatcttctatagtcatcgctatgacggagtcactccggtagaagaaaccattcaaacgttgattgatattgtaaagcaaggaaaagctctgtatatcggaatctcaaaatatcctcctctgcaagcgcggattgcttatgaaatgatggcaaaagcaggcgttccttgtcttatcagccagtatcgttatagtatgttcgaccgtgcggttgaggctgaaagccttcctttggctgccgaatacggttccggctttatcgccttttctcctttggcgcaaggattactgacggataaatatctgaatggcatccccgaaggctcacgcgcggcacgtccttccacttttctgcaacgttcgcaagtgacgcctgaaaaggtagaggctgcccgacaattgaatgaaatcgcccgtcaccgtggacagacgctggcagaaatggctttggcatgggtgctgagagacgaacggatgacatcggttatagtaggagcgagctcagtgaatcagctggcagacaatttgcaggctttaaaccagttggaatttactgctgaagaattaaacgggatagaacgaattttgtgtaaagtctgatggctctattgggataattggactgtcatttgctgagagtgattaaaagattattaatcataattggcgcaccaaacttatttttttatacatttgcaacggactcttccgcagaaagcctccgggtggtgggggagccgtgtatatagagaagacgtttacaagcgtttgtctttcgtgtttcagaacttcgcaagtctaactgcttattttataaacatctgatattcatgtatttatgctcaatcataaacttttaagaaacaaaacagaaacaaaagtgacgagaaacacgattttgttcctttacctgtttcccttgctttctttcctgtcagataccttcatttttgtgtttggatgataaaacgatagttcgttttgtgggcttgatatgtttcttgcggactacctgactcggtgtttcttttccctatgatcaatctggttgtcgaaatccaagtgtgaaattggcgatagccttatcactggtacgaagattttttgcagtcaaaggaagaaagacttcctgcacctcttctacggttctttgcttctgttcctgacgtaagcgatccttacggttttcgagttttagacggacatatatacagtttactttaggttagcatatatataagagctaaccaaggtaaactaaagtgttttccgacctcttgtttcacctctttttcgatatggtaagcagacgttatttctgcctacctatatatagtttactttaggttagcatatatataagagctaaccagggtaaactaaagtgtttttgccctgtcgatactgcacttcgtgaactcttttctcctttgactgcaaaaacctcttatagccttatctccacttgtagcgtacagttgcactgctgtaccatgctgtctgccatgtaccaccccatcgggctctgataagaattgtgttgcaaaggtacccgtcatggcgttcatcctgcaaggtcggtgcctgtggtttgtccgtgaaatctccacgctctgattgcgtcagaggtagtatttgacggcaaaaccttgcattgatgagccataacaccttttggggcaacataattctttaatcaatcccgatggtagttggttctacataagggaagaaaataaaaattttatcttatggctaacatttgcgacactcagtacaaggtgacaggctcacgcaaagccgtggcagacctttggaacacactccaagagttggaggtgaacagtaagaatgtgtatctgtatctcttggcagaacactatggcattgactacgagaagaaaggtatctcggtgagaggacacatctattgggcagagtttgaggagaacgtggaagacgattatgccctcttgtcctttgacaccgaaagtgcttggtcttcatgcgacttgttctttgaggaggtgaacaaggcacttggcgacgaactttcaatcagttggcgagaggttgagccaggttgcgacatcttctatacgcacgatgagaacgacttcttccccgaagagtgctacgtcactgcctacggagaactctttgaggattgtgagggtgcttactccacctttggcgatgccatcaggttgtggtgtgagaagactggtgtctcacaggacggaagaaacgaacagaagatgattgacttcatcaatgaatacgagtatgaggcagaggacacgaatttctgcatcaatccaatcacattcggctaacaaggaggaacggatatggcaacgatagacatggagcagttggacggcgttgtagggtgtttctgcaccttgctttatccccgaagaggtcagacagagggaacgattgtcgaggacttgggttgtgaggtcattgtccagctcatcaacggcaaggaagtgacggagtacaaggatgatgttgtcatctgtgaataatcaggagagagtctgttggctatgtggcttgcagactctttcttcctttgactgcaaaaactcttttaggacaatcctccaatgaggttatggttgttgtaactgaaatatcttgggagcaagttgtgcagtttgctcacttgctccagtcctgttatagaagcgatgcttcgacagctgtatagctacacgtcgccaaagtcccttcgccgttttaagcaacccgtcaccttgttataggaatggtcatttcgccttttggttttactcgtctgtcttttgcgactcttccttgtcggacacagaacttggtcttagcatgatgacagtgctatcgccaatcctctgatgtctgtcctcttttggcttgatgcctctattggtaagctgaccctttggcttgtcgttcgttgtgcataattgttcatgctcctccatcttcagctgatacagctataaggtcggatttcccgcttcgtttctccaggcataccgccatagcagtgcccctgtctgttgcatacggattgcctccttgcttacaacctttgttccattgttttgccccgtctttttctgaattgagttatttgaaagccacttatttttaccatgcaaaggtagcgtgatgctgcgaaggacttcctccttcttgtgtggccgctatcgctgtgaccaataaaatagtgcgtaatcttcctttttcttcctctctgtcgttcatcgccaacaagaaaacgagtattgcgaacgattttcatggtgcttcccacatggtgccacatccctgcttttgaatgcatgtaaaaattaagtttcacttttaaattcaattcaaaatgaaaaagatcgagaacaacttcacagtttcaggtttcgtaggtaaggatgcagaaatccgtcagttcgcaaacgccagcgtagcacgcttctcattggcagtaggccgtcaggagaagaacggcgaggaaaccaaccgcgtatcggctttcatgaatatggaagcatggcgcaagaacgagcacaccgaatcattcgacaagctcacaaaaggcacgttgctcaccgtcgagggtttcttcaagccagaggagtggacagacaaggatggcgtgaagcactccagaatcatcatggttgcaaccaagttctacgagtgtcccgacaaggaggagactcctgcggaagagccggccaatccagcaaccaagaagggcaagaaatagcctttcctcttcataacaaggcgaccttcaggtcgcttttgttttgctcagggacatcaatctgctgttatagcgtgtgataatcttctctaataacaaccatgtgcatttattaaccataacggcaacgccgtcttcctttattctaaccacttcgtccctcaccatttgcgaaacgtcaccaagatggttggcatgcagacattcctggctgatggcaacaaagtcgctattagccaagaaagacagtatgccaaggtctgaacgcgagaggactgccatctatgccacaagatgccgaagccgaggcttctgataattgtgtcctttactggctatccactcgccttgatattcagaccgtcaatcttgcgacagcttcactacccacccacacctgctttactattcttcttctctttgactgcaaaatatcttctgccataatcggtgtgtccgtccatatgcgttgtaccgcttcgccccacaccttcagaacggcattactgtacggacaccgcacgtatcccatgtgacaggcagccaacaatggcactatcagaaactgccacttctgataactgcctttattgctgtctggctgtcccattattgggcttcggcaatgtacgtgtaatgtcattctgcccacccataccacttataccaataatcaactgttttacatcctttctcctgctatacaagaggcagttcttgtccactcaggcatattgaatgtggcagacatgtctgctacgtccaatctgcctcagtgtcctgcggcaaggacaaggcacatttgtcatgctgacaagagtgcccgatttgtccgttacgcaactgtctcttcttacctgatatacgttactatctacctcttaattatactgctacgccccacaccttagcgaagcgttacatggtctgtcatcatacagacacccttggctgatggcaacacgtttctattagccaaagctgacagtatgccgaagtaccgacgcgagagaatagtctgtccgtgctacaagctatcaaggctgaagctttgatgacttgcatcccggtcagccaacacactcgctttatgtcggtacagcagacctgcaaacacttcactgcccaccctgttcctgtttaactctttcttcttacctctttatatatcacatcattcctcttgcagacaatatcaatgatcttcttccaatcagcgcagtggtaggcatatttcctgcaaagttagccgcctctgagacaatcgtcaaattctgcttgaggtcttgtgactgtgaacaatcttccttttcctcggaaaagagtattcttcacacataatttgtctttatgtcttttttgcggcttgtggaagcagaaaatatccctccacaggctgaaaggcctcgaaaggagggaagagaaacaagtccagcgacatgggcgacaaacttatttgtatcacaaaaaaattgaaaggcaatgaagattatcatcctgcatgatgctgacgcacgcatcgagtatcttgacgtagccgaccatcttatcggctcagacatcgaggagtttctcaccagacagggcttctcagtgaacaatatcacatggcttgtcacatcggcagaccatatcccagtggtttaccacaagtacgacatcgaccgcaagaccggcgaggcgactcacacccaacgagaggcggaacttaaagacctcactatccacggacaactccaggcattgaagctccgggagcaggacgaactaaaagcggctcttcgcaagtacggcacggaagtggacggaggctttgaagtgcatttcgagggagagcagcctatcgtggcaggttatctctttgacgagcctcgtgatatagtcatagatgcggcacgtttggattctgacggcaacttgtcgcttctcggagaggacaaggaagtgagggatggacaatacgacatagagccaagtgacatatttagcggtcagttggactatgtcacgtcgagtataggtgcatggatgaaggaggagcatgtatgacccagtgcatcgtatatgacgagactaccaaggagagcgagaccttttgctcattgaccgcagccaagaagtggatgcgagagcgcatcaaacagaagcatgaggtaagcggacagaagtacagagtctattccgacggagagtttgttaattgcggctctatcagtctcacaggcagcaacaagtcttttgtcgccaatacaaggcagacgaagaaaggatattaataacaaggtaacggcaagcctaaccaacttgccactataacatttttacattatgatttacactcacactatcggacgcatcggagcaaaggattgccgcgtcatcacaggtacacacggaacattcatggctgttgacatcgcagtggacgactacagtaagggcaagcaaatcaccacttgggtaagggtgaagagcagcaaggagaaccatatccgtttggctgaatacctcaccaagggtcgtatggtgcttgtggaaggcacactgacttcttccatttggacagaccgcaacggagagaaccacatacagcatagcatcatagctgactccatcgcctttgtcaatgcagggaagaaggatgcagccgacacacctgcaacaaaggcacgcaaggcagtcaaggcagagggcgaggctcccgtaccgccagccgatgcaccgcaggacaagagcgaagaccttcccttctgaggatagcatcaactgagagtagtacgtactaatcgtagtaaatccgcttttactatggttagtatgtactatcagtagtagaatagtaaagtagtatccactaatagtagtatcatgttatgacacagataattgcagtattaaatcacaaaggtggcgtagggaaaagtacgaccgcagtaagccttgcggcagctctgcaactgagtaagaagaacgtcttggctattgacatggatggacaagccaacctcacggaagccttgggattgtccatcgaggaagaacagacagtctatggcgcaatgtgtggacagtaccctttgccgttggtcaagttgcacaatggcatcaaggttgttccttcttgccttgacctgtcagcggcagagtccgaacttatcagtgagccgggacgggagcttatcttgaagggacttatcaccaaagccatcgccaaagagcatttcgactacatcatcatcgactgcccaccatcattgggcttgctgaccttgaatgccctcaccgcagcagactacatcatcatccctgttcaagcacaataccttgccatgagaggtatggcaaagttgatggatattatccgcatcgttcaggagcggcttaatcccaacctcaaagtaggcggcatcgtcatcacgcagttcgaccgccgcaagaccttgaaccgcagcgtgagggaattcgtcaatgacagttttcacgagaaagtcttcaagaccgtcatccgtgacaatgtggctttggcagaagcccccatcaacggcaagactatctttgagtataatcccaagtccaatggtgccagtgattacatgtctttggcaaaagaagtgttaaacttaaaatagcatagccatgagcaagagcagtatgttgaaagagggaatgaaaggcggtctcaacggactcctttcttccacaaagaagccgagtaaggagcagatagtcacagaaactacaccagcaccacctgtgtctgtttctgagactaccgaagtgcctgtgcattgcaatttccttatcaacaagagcatccacacgaggatgaagtacctcgccatcaagaaagggatgtccttgcgtgatattgtcaatgaggcaatgacagaatacctaaagcggcatgacacatgagtgccgcgcggtatcatcgccggacagacgatgataccgctatctcttctataaacagactttactatccgtagtatggtagtaaatactattcgactattatactatccgtagtcgatactacttttaggaaatactatccaactcatttttagggcaatagttttctctgcttgtaggactgtctccatgctgataaaaggcaatttcgttccctattacaagattttctctttatccctcatatcaactatcgtccttccccatatacggcatagccccacgccatcccgccctggttccccttttatgtaacagatttcttttcgcctgccttgccgctgcggatattgttttgcaaaggtaatgctggcgattgttcaaacaccaaatcgtccattgcatttgaccgaaaaatcttcctcttcgtgcagagcgtatttttcgctcccgatttggctttttgatcgccatcactcttggaaagcaaaaaatatcccttgggcaggcaggaaaagcctccgaaataagggaagaaaaaacatcagagcaatggcacacaagaatgactatcaaatccaaaagcagttagacaagcctcagacttggttctgtaaatattatccatcacgcatccgcaatgtgggtgagaaggagattaccgacagacaattagtgtttgacttcaaggacggaagagcctacgaggaagtggcgcagcgcaccgcagagaatatgctgacactctacggcaagggttgtgtgaacatcgtcttcgcccccgttccggcatccacaagcgagagcaacgaactccgctacaaggctttctgccacagggtttgtgaactgacaggagcggaaaacggctacgagcacgtgagggtatgcggagagcgcaaaaccatccacgacaaccgcaagaacgaggatgaagtccgcaaggcgaatgtcgttgagtttgatgagccgttcttcgacaacaagatggtgttggtctttgacgatgtgataaccaagggtctcagctatgccaagtatgccaaccaactcgaaagtctcggcgcatgtgtcattggcggtatgttcctcgcacgcacacattataaagtaaggtaaagtatgacaaagtacaacaaggcagtgtccgtatgcttcagcggacaccgcagcgtacccttcgccaagcggagggagttgaagcaatgtctgaaatcggagatagccaaggcgtatgccgacggctaccggtgtttctattgtggcatggcaatgggatttgacctgctggcggcagaagccgccctttcgttgcaaagcaagttgaaggacttgctggtgatagccgtcgtgccgttccgttgtcagtctgacagatggagcaaggaagagcaagccaagtacgatgccatcctacgcatcgtggatgacgtggtcgtattgagcgagcgatacttcaacggctgccttctgaggcgcaacgactacatggtcaaccgcagttcacgtctcattgcctacttcgatggcaatcccaagggcggcacgttctacaccgtcagagaagccaagcgacagggattggacatagtgaacctatatcagagtgtataacccataaaacaggaaatgcttatggacgatattgttgcaatcatcgtttgctacttcgtgttcggagctttgggcaatgtgctcagagctttgtttggcggagaaagacgaaacgacttccgcagagacagatgagcaactctgcatatatttcatagagagcactacggcttttctttgtcgccgtattgtactctctcttccgctgccatctgaatttcctcagtaggcagtgcgtattgccgtgcgctgttcggtgcagtggcggcggaatcagtggcgacgggagcaagacgttccttcagccgggtgttgcgcttcaacaccttcatgttgtgaatagcgtaggcaagggctttggtctgacccaccaatacacaaatctttttggcacgggtgatacctgtatatatgaggttgcgctggagcatcacatagtgggtcatcagcaccggcatcaccacaatgggatattctgacccttgcgacttgtggatagtggtggcgtatgcaagggtcagctcgtccagttccgacgcttcatactccaccatctgaccgtcgaaatccaccgtcaaggtgcgctcctccatatccacggagcgcacatagccgaggtcgccgttatatacatccttgtcgtagttgttgcgcagctgcatcacacggtcgccctccttgaaggtgtagccgccacggacgagtgccgccgtgttgtggttcagtgcctgttgcagagccacattcaggttggcagcccccaccacgccgcgctgcatgggcgtgagtacctgtatgttcgcattcggctggcggtaagccttgggcagtcggtcgcgcactaaggaaacaatggtctccgccaccttctccggctcttcctgcttcatgaagaagaagtcggtgtgctgaccgttgctgatgtcggggaagcagccacggttgatggcatgggcactcatcacaatgcggctcgactgtgcctgtcggaagatgcgtgtaagccttaccacagggatgactcccgaatcgatgatgtcgcgaagcacattgccagctcccacactgggcaattggtctatgtcgcccacaagcactaagcgcatcgtagtgggcagtgccttcgtgaggttgttcatcaggatgatgtctatcatagagcactcatccactatcagtgcatccccctccaaagggttctcatcgttacgcttgtagccgtcctgcggattgtattccaatagtctatggatcgtttttgcttccatgcccgtagcctcactcatccgcttggctgcacgacctgtgggagcggcgagcagtatgcgcatacctgccgactgcagggcggcgatgatggctttggtcgtggtggtctttcctgtgccaggacctccagtgagcaccatcaccttcgaggcgatggcctgccggatggcttccacctgcacctcgtcatattcaatgccagtttccctttgcaacttggcgaggtcgaagcgagcagtgaatatggaacccgcttctttcgtatgtactaatgtgttcaggcggtttgccgtaccgcactcggcatagtagaacggcggcaggtagatggcagtgccgtcgagcatcaggtcttctgtctcgatggcgtgggtcatggcggtgcggatgcattcctcgtcggcttcgagcaactgctttgccgtggctatcagctgttcctcctccgcatagcaatgcccctcgtcagccagttggttgagcgtgtagatgagtccgctgcgcaaccgcctctcgtcgttcatctcatatcccatcttgcgggcgatgccatcagcggtcttgaaaccgatgccccagatgtcatcagctaatcggtagggattctccttcacattgtcaatgctctccttgccatactgacggtagatttttgctgcgtatgccgtgctcactccgaagccctgcagaaagagcatcacgttcttgatgtccttctgcttctcccagctctcacgtatcttctccacacgcttcttgctgatgcccggcacctcgtagagccgctcgatgtctgtctctatcacctcgatggtgtccgttccgaaatgccccacaataagtttggcgaacttcggaccgatgcctttcaccagtccgctgcccaggtatttctctatgccgtaagccgtggcaggcatcacctcctcccacgtctcgcactggaattgctgtccgtaccgctaccgcttatccaccctccattcgccttcgcatagcaacaccgcccctgccggcacttccagcaggttgcccaccaaggtgacgaggtcatcgtaccccttcaccttgactttcatcaccgaatatccgttctcggcattttggaatgtgatgcgctctacgacgcaacggagtttggtcatgtatttctgttcttatttcaactgcttgccgtctgcaaatgcattgcccacacgctgccccaaggcgatatagccatgatgaacagggtcgtaggtgataagctgcatcttctccacatcaggcttgccatcctcggcaagatacttttcatctatcaggatgttcactatctccgccacgatgtaatagccttccgctgactcgtcgattttctcttttatacgacattccaaagtcatggggaagtcggtgaagacgggagcattgacattctctgccttctcaacgttccaacctgtcttcgccattttgtccgcatcgttcttggcagatacgatgcctacgaaatctgctgccaccatggtttgctttgtagcaaatgccacggtgaagtcggggcagttgttcagattctcggtagtggcatgtgcgcccatggcaatcataatctcctttgcgtcccattgaccgccccaggctgcgttcattgcattgggcttgccattcttgtcgtatgtaccgataatcagtaccggctgtggaagcatccacgatttttgtccaaatgatttcattattctttctattttcttgttattaactcttgtattttgtcttcccttataatcttcggttgtgccttacctgccagaacgagaattttcttcccattcctgtatatgtgcaactgcctgcttcgtaccacagccgtcaaggtctcatcatcctgcatggcttgccatatcggataatacacaccttctggttcaaacaacttcttctgaaggtgtgagcacatgttggttgtatctattgtcatatcgttacgtcatatcattaacatgattctgccagcttcttttgtgaacatttcagggaaacggcagattgttgcatacacctgcttgcttgtcacaggctgaccgtcctttctcaggtgcagcctatgacgattgatggcatcggcaatctggtcggttgtcatgccgccatttcgctttaccatcacatatactatggcttcttctatcttcatcctttattcatctgtttttcaatccatgccatcaatacggcaacagcatattcctgttcttccttggtcagtgccctgcctgctgagatgtgatgccacttgaagaagcatccccggcaacaacagccagtggcatgttgagccaggaaaacaggatgcccacgcatgggagtctgcttgccgtcgttcggtatgacagccggagcaagtctttttgccacaaagtcctctgcgtgttttcgtatcgtcggcaatcccttttccattacatactccctgtcttgcttggacagatggaaccggctgcgaaaatcagactttgccaatctctcaaagagattcgtcaggtcatactctttcttatcaccaggaacgctttcttgcggctcttcctcttggaacaacgatggatatatgtatttctgtgacatcattatctgttgcttctgatttctaatgttatatccatatatgaccgcttgccgtctatatagtctgcatagagtatttcttcgcttctgcctttcagaatatggcacttaccgcacagctcacagttgtgcagacatctccattcattcagaacgtaatccaaacgttcctctcgtgtagatgattcaatagagggtgtgctcataatcagtgtctcccacagcgtggtcaatcagtgcctgaaactcttcttccgtatagtcttcttcccaaccatacgttacgtcctttatgcccaaagtaaaccctaatgcctcagaataggatatgccaatttcagctgcaaggtctcttgccgcttgaaaaatctgctcttctttgcttaagggcagttgtttcgctttcttatgttttttctttggtttccccatttgagtatattcgtttaataatcagcgttgatgggcatcttgaaattcctgtatttctttcggagttcctcattttgcgccttcatttcctcatacatatcattcagtgcgtcaggaaatccccatccacaagggcttgtccaacgaaggcattgcttgattcgggaatcatacttgtcccaaaggtcataaagcacgatgtggcgcaatgtcttgtcgaaattactctcaacagaatcatagaattgctcccacatgtctccatagtcataagtgaactgacaggcattctccatatagaacaccatcaattctgcgactgaatcttccgaaggcttcagtttcttgaagtcggacaatgccttgcggcacactgagaagcgtgtctttggctctctgtttctgctcggatagaactcttcccgtatgatgtgcttatactcttccagcttctggccctcattcggctctgcatagaagtcaagatattcctttgcctctttccgtgcagaataaagttccaataccatttttattatttcactcttgtccatggacatgaggacagactttaatttagattttgacatttctgctcttttatcttaaaaacgggtcaatcgttgccagcaactctgatttctgcatcacaccgctcgtcctccacaacacttcgccgcgtctgaacagcatcaatgtgggcacagactgtatgccatactgacttgcagtcaccccatacttgtccacatctaccttgatgatgcggattctgtcacccaacacttccttcacctgctcaaggatggggtgcatcatcttgcatggctggcaccaggtggcgaagaaatcgaccaagacaagttggtcacttgatataacgtctttgaatgtttccattacgattttctgtaaaattatgctattttctttcctgttatcttacaatactgccctgcaaatgttaaaatcgagaagaattcaatgaaaaaccttcgttatttcaaagaatattcgtacctttgcagcgctcatctatagatagaaggagtttcgagacccggttgcctttgatgcaattcgggtcttgcgttttatagtggtgtctgcaatctctttttcatcttcttttccaaagcctttagtccatactctttgttaagatggtatgctgtcaacagatagaatccgttgctacgttgttgttccaagacaataacatacttttccactttatcatagatgtatgttttcttgaccttacgctttttgccgtccctctcttctatggtaaatacatccagattgtctggtgtcaattctctcacatggtgatttatccaatgaagcctttgtgaacgagccatctcgaatactcgctttggataagtcgtaccgtcttcgttctcaaccatgatttcttcacaggtaagatgcttgaacaatcttgccatgtcaatctcgccatctgtctttataggatagatgcgccaccctctgaatgagaattgacagttatcttctatatcacgcttgaatattgcatgaagatcatgctctctttctcgttcactgagatatgccagttccagcagctcagggtatttcttgataatattcaaactgctcattggctatttcagtgcgataaaaaacaaattaaacttctttctaaatttgggagttgtggtgttgagactgatattactgtgtttttttatcttttcaatcagcttcattttggctctcacccttccttcaacttctcccttttcatatctaaggttgtagttgatggctcccattagaacatctgccaattggatgaagacactttcgtgtgaacgtataaactgaaacctgccaatggaagagttgtattccattatttttctgagcctctccagcttatcgctactgcatgtgtccttgatatccatatatatgttatatgtataatccatgtccatcttgtgatgcagcaattggtagtacatgcgaaagtagaaatcattaaacgtatagtcttctcgtttctcgtcaatctgactcttgtcaacaaccacagccctaaattccatgtcattcataaagaaccagtctataagctctgcatagactttatacgtggcctcgtggacatttgtccatttcagctcatcactatagccgtgcttcttcttaatatcttttatggcatcttttgccatgcggatttgtgtgtatgctatacttgtacatcccaaaagcatgtagggatgaccgtcatgcaccatgtgggtgctttcatcacagtagatgttgaatgtcttattcattgtatctgttttttgtttattctttattccttttcttcagcggtccactatgaggtccacggttcagcgtcacaccatgcttgttgagtatgcggaacacggaacttcggcttgtgaagccgctgatggcaaagatgtcatctatgctgtgcccctcgttgtacatgttcacgatattcttctcacgctccagtttcgacagtgccctttccgacttcttgggcggccggatattctgttgcagatggatgatgtgtgccgatgccttgcgcagcacggcacactcctcagagagtgacccgaacatacggatgacctgtgagggcttggtgtcggggaaaagttcgtcaaacgtatcgatgcggtcttggatggagatgatgcgaaccaccttcacacggcagtattctatgaatgtagccagttcacgggtgccacgcagtgcgttactgaacctcgacaccaccagctcgtcgccgcgctccagactcgatatgagctgcttccacatcgggcgcagcctctcgtgttcggacagttcctctatcacctgaacacagccgtattgctgcatccaagccttgtcttctgcatactcttcgccattggtggcgataaagatgtaacctacttttgccatactgttgtacgctattaaatgaaatcaagtgcaaaggtacactatttttccgagaaacaatcatacttgaacgaaaaatcatacttaaacacgataatttgccattttcttttcacttgatttcattgaaaatcatactcgcaagtatgatacacaaataagattaaacttactgtcattcttgcaaatatatcgctgaaacgcattaactttgcaccgtcaatttcaaaatcagactcaaaataatgacaacaatgaaatatgaaacccaacttttcggaggacaaaccaacctccattgcatgaagcaaatattgcataatgcaaaatcaaactcgcatggctgtatcagacttgccatttgtattgccactgcgtttgccgtagtcatgctgacagcatgttcagacggaaacggcacgaagtcgttccattcgagcgatgaagccatcagagagtatcatggctttctgaccactcttcgacagaacggcaaggtctcaattcagacattagttaagattgtcaacgaatggcgcgtgttggacgattccgtgacatcgtgcatctcacgtgacactgtcaggaaagcccactcatacccgttcacggtatatcatgagttgaacgactccatccacatcgagctgtgccgtatggcgatgtctaagcaacgcacctttcacgacctgctctatctcagagaacagacctcttcccatgttggtgatgaggaactacagcaagccgtgaaggaagcacagccattcttcgcttccttggatagcctgcctatatataataaaggtggtaaacaggcggtactgaagcgttacctgctgttcctgcaaaaatccgccaagcaaggcattcacggcaaggaagacctgctcgctttcatcaaggaagagcatttgtatttcaaatccttcctgcaatacctgccggattttgctgacgatgacatcggtgacatcagacgaaacaccgaacactgctgtcgggagatactccgtgccgccgaccgcaaggatttgtcccacaaggatgcaatgatatacctctccatgcgcaccaaccaccgtctgctgcgcaacgcacaagcggctatcgaggatctgaatagtggcagggtaaaggacgagcacaccatgcacgcctacctcctgatgatgatgcagccgttcatgacgatggatgacctttccgtgagcgtgctctccgacaaggacaaggcagacctctacaaaatagccgatgcgctccccaaggagatggacggtctggccaagaaactgcacctcgacaagcaacgcctgtcggatatgcccatgctcatgatgaagatttatgtcacaagattataaacaccccaaacagagaatacgattatgttagaacagttttgcgatgatttccttgccgtcgtgcctttgcagttgccagaactgctggacaagcgcaagatggagaagcctgtcaagtatgacgattacgtgcttcttactttccagttgaacacccctttcacgatagaggaggtgatggatatgctcgaagacgagatggaaatgataatcctctatcaccacattccaagccgtcatacggagttcggacacagctgctgtgcctattccaacccttctttcggacggatgttcaaggtcaacggctccacagatgagcgtggcatggtcagccagataaaagtgaccatctatgactcgctggagcacatgtcggcagatgtatgcctcgacctcagtctgcattgcaagaacgggttcttcaaatacatgaagcccaaggaggaagtcctgctcgacttcatttgaaagttacatttgccagatgacagtcctgttctaccgcaacaacgctccattctgttgtccacaacaaaggccaaagtcatgccacaagctcccgaccatctgatgaaggaaacgctttacatgaagattatccatcttctcgaccgtcaccgcacatggctggagattgagagcatcgccactgtccgcaaccacacgatagtcaggaacggcagaatgaccgacatcctcagccgtgtgcttgtggtcaaggccatccaccatcatttcccctacacgagagggcaagtgtggcagatagccgagtacgacttggaacaggctatcaagagccttcggacaaccgacggagctttccgtcagagaataatcaagggagaactgacactggaggatgtggagcgtatcatatccactgccacacacggtgtcgtccagcccgacctgagtccacttccattattcacatgctatacatattatgacaagtaagatactgtttctcatcctgatgtcagcgttcttctttgtgacgatgattctgcacagaagccgcagacagtttatgacacggttctatctgcgcatgaccgcgcttgtgacagcaaggaagctctaccggttgatgctgctcatcctgctgtacgtgttccacttcctctacctctgtgtacactataacgacataggcgtagtggcttccaccatagcgtttgccatattctttgtctttatggatgtggagaggtggctacagcgtctgcacgaggagcggacacccttctgcatcgccgcgttggcggcagtggtgtttgtcttcactcctcatctgttcacgcttgctgtcaccatctcctttgtccttctggcatcactgttctatccctcgcgcatagtcatatcgctgtggaagaacaaggctgaccgcaagatgctcctcgaagacacagaaatgctcatcatatactactattaagtatcacctgtatcatgccgttccttttgtataatggagctggcgacaaacaacagtattcaccaaacagattattgaaatgaagaaacagaaacatagaacgagttccggcaagatgtctgaacggatgtccctgttggagttcttgaaagagaggtccgggataaggctgtcgaagctcgaagcctaccttgaccttgtagacaaggcttctgtacagtacatccccaaggatctgtgcaagcaggagttcagcctgtccaacgggcagtttgtaatcaccattaccgaactggcaggatgctggcattggcaccgcgccactgtccgcaccttcatcgagcagttggagaagatgaaccagatttccgtcacccgtctcacgaagagccaaatcatcaccatcccgatgttggctgagacacctgccgtttctccgattgacgcagccttggatgtgttccgccagaagatgtgtaccgcattggacgaatggcgaagcggcaagatgtccgcatcggcttgcgcctcggaatgtgaacaactctacgaagatgcaacagaggaagtagccattatcttgcagaaagccgacaatggcaattcaattggcaaggtgccatgcggaagaaacattcccgaatctgtaggacacgccttttgtatgactgcactcacagctgtctgcgaagccaccttccatcaggtgctttcgcaggaaacagataacgccctcgttacctcccttcttcccttcttttacaaagacctgggaggagactggctctcattcatcgaggcggcaaaggcaatatcagaattggcattggatggcagctcaccagccttgcatcaggaaagcgcagccatcaagtcacagtttcagtcactctgccgaccgttccttgccattgtagccaaccaagagggctcctgtccatcaaaaggctgtattaacctctaataatcaccgtacaacgcttcttcttttctactggcacagtgtttacacgtctgccattgctgtaaaataatcgggcttgcccgttggtcggaaatgagggaatttgggtagcctaatacccctcttggtctccgaccatcgggaggctgtccttacaagcagcaagctggagacaggagagttgtacacacataaaaggaaataggttatggcaacaccaaaacaggttatggatttccgaccatctaagggaatcaccacagcacagagcaacgagcaccaacgccgttggacggaaaagggttggggatccgctgaatcaacaggcaactacgaccgcagccgtgagcggctcaacttcgaggttcggggcggcaaggtttgtcctatagacaagagccgaagcatcccggagcgcatggcagacatcctgcggagccgtggaatcaaagaccccaacgagggactggcagagccacgcttccgcacagtggtcaatttcatcttcggaggctcacgagaacgtatgacagaattggcattcggtgaccagaaggtgaatctcactcacggagcggacaattcgcatctaacccgatgcaaggacattgaggaatgggcaaaggatgtttaccgctttgttgcggacaaatacggtgaggagaacatcgtcgctttcatcttacacttggacgaaaccaatccgcacgttcactgcaccctcttgccaatcaaggacggcaagtttgcatacaaacagatattcgccggaaaggacaagtacgagttttctgccaggatgaaagccctgcacagcgaatttgccgatgtcaacaagcgttggggcatggagcgcggaacttccgtctcagagacgggagcacgccaccgcaccaccgaagaataccgccgccagctgtcagaacagtgcaccaccattgagcagtccgtcgccacccatcagcggacactcgcctcgctccaatcggacatccgtctggcagagcggagagtaaaaggactcacctcaatggtcaacaacctcttgcaggagaaggctgagaaggaggcggcacttgctgaattgcatcggcagattcttgcaggtcacgacaatcctgatgctctccgtcagcaagtccaagagctggagcaggaactgtccgctatccagtcgaaactggacgacaagcaggagaagctctcagaggctgaccgcaagctcgatgccctgcgtgaggagatgaccgccatgaaggagcgcacggaggagttgcggcaggaggcacacagatattccgatactatccgacaaggtgcggacaccgttctcagaaatgcccttctcgaaaacatggtcagcgagttctccgaacgtgtggcacggctttccaatgagggcaaggacgtgtttgacggttccctgcttcaggcctttgcggagaatggaacggaggtgatgtactgtgccacgcttctattcctcggctacgtcgatgatgccaccacctttgccgaaggtcatggcggtggcggcagttcgtccgacctcaaatggggacgtgacgatgacgaggatgaacgcgcttgggcacgccgttgcatgatgaaagctgcacgcatgatgcgcccctcttccggcaaaaggaagaaacgataagcggcactgtcacgtatcacctgttatagtattcaccagattaaattgaacaacatgagaaaaatacttattctatcccttggcttcgccctttcattgggtgcgcaagccaaagactatcaccgcacggcggacaccaccaccgttgtatgcagactttcggcagacggtatgcttcgtccgcttaaaccttcctacatgaaaggggcattggtagcttcgccatggacggacaactggtttgtccaagcggcaggaggaactacggtcttcctcggcaaaccgctcggatgcaacgacctattcggtcgcatgaaaccggcattctccgtgtcgatcggcaaatggttcacaccttccgtcggcggtcgtctgaactatggcggtatgcagttcaacgactgcaacaactcctcgcaggactaccagtacctgcgtgctgatttcatgtggaatgtcctcggcaacctctacaaggacgatgtacacactcttgccagatggagtgtcattccatacgtgggcgtgggtatgctgcacaacaaggtgaatgcccacaagccctttgccatttcctacggcatacaggggcagtatcatctctccccacgcattgctgttacggcagagataggcaacatgaccaccatgcaggattttgacggctatggcaaggcacaccgccttggcgaccatctgctgtccgcatccctcggcctctctgtccgcatcggcaagactggctggaagcgagtgatagacgctcgcccgtacatcgcacagaacgaatggctttcggcatacgcctcatccctttctgacagcaacagccgctatcacgcccagcacgatcgagattgtcagactctggagcagctgcgcaagattcttgccatcgagggacttctggacaagtacggccacctcttttctgacgatgccgcttcttccgtcacaaatggctatcctcgaaacgactacagcggtctcaactcgctgcgtgcaagaatgagagacaagtatggtaatggtcaaaagacaaaggtcatggagtccgcctcttgtacagaagaatatggcaatgctgaaggtgagccggaagacgattacctatcgctcatccactcaggaaaggcttgcataggtgcgcccatctatttcttctttgaacttggcactgacaggttgctcaacaggtcacagctcgtcaatctcgacgaagtagcacgcatcgccaagaaatatggcttgaaagttaaggtcatcggcgctgccgacagtgccacaggcagtgaagccatcaatgataacctcagccgttcccgtgccagattcattgcagaggaactgatgaaacgtggtatggaaaatggcaccatctctcagattttcgatggcggcattgacgattactcgcccaatgaggcgaaccgccataccagaatcctgctgtatctatagccagacatacagctccgaacaagagcactaaaacttttttttcattgataaattttagaaagggagggcttgtccgtgatggataggccctcccttaatcatatatgtattaacgcatattctatgcgcatatcttttttttatccgtgtttctcagtacttgaccagtcaagcaggaagtcatatatactcattatctgtatgccgttttcgtcgctccactgcttggtatgttctcccacgatcagcagtttgcggaaagagtcatctacaagacgcaacgaccgtttctcctgttccatcttttctgcatcgggcatacgccacgccgactggatgtagatccgctcgctccctttgttgcagacaaaatccacttccaatgtcaccctctgctgctttccttccgtattcctcactcgatgatagacgttacccacatccacgagccatcctcgcatacgcatctcattgtagatgacgttctccatgatatgtgtcggctcgctctgacggaacgacagaatagcattcctcagacctacgtcctgataataatacttggacaacgaacctatgtatttccgtcctttgatgtcgaacctttcggatttttcgataaggaaagcatcctgcatatattccagataagccgacactgtcttgtcggttatgctctgcacattgcttacggacttgaacgtattggctatattcagtgcattgacaggtgctcctatactggatgctacggtcttcgacaattcttcaaattcaggtctcagttctatgttgttccgctcgtagatgtcacgtagatataccgtgcgataaaggcgacgcaggaaatcagccttcttctcatccccaacctgtgtaagtagttgcggcaaacctccgtacagtctgtattcagcccaaccgtcttctttcgaaccatcatacaccgtcatgaactccttgaaggatagtggccacacatgtatctcgtcacctctgcctcggaattccgtcaccaggtcagaggacaggaaacgcgagttggagcctgtgacatacacatccgccccttcggtaactgacaaggaagagagcacctctacaaagtcttctacctcctgcacctcgtcgatgatgatataataagtctcatagtcaatcatcatcttttccacccagtccaacaggtagtccgggttcttgaactctctgttcttcctactctccatgtcgatgacgagaatatggtcttctctcacgccctcatccaatagatgctgatgaaagagtttcttcagaaggaacgacttgcctgaacgtcgcaatcctgtgattatctttatgagcccgttgttctttgaacggctcaactgttctatgtatctatatctgtttactatcatattttacgaaaaactgtcacttgtgacactttttcggaggcaaagttatatattttatcctaaatcaaagaaagaaataaagaaaaatgcactaaaaatcaatgattttcctgttttgtagtgtctattccacttgccgatgcccatttttctttgcaaagttactgcccgggcgaatggtcaagtaccgccatgctaacaggcagaggactgaacgacagctttccgcaaatcaaagatttgggtatttcattaactcctccgtctgttttcttgccttatcgccctcattccgcagtcttttgatgcacgaaaaatcagttcccgacaagaggagccgaaaggcttcaaaaggagggaagaaaaacaagttgaacaaataatttctttgcgtatggaattacacagattatcagaaaacgagcaggcatttgtcgagtgcttctcacggttcgtaaacggtcagatggggtcagccgccaaggtaggcaatgcccttgcagatgaccatcgctatcttatcaacgaaaagggcaaggtggtgtttgccttcttggaacgccttgccaacgactatcaaaaaggtcgttatgaccagcgtgacgagtgggtgtgccgattggcagcagaggccatcgaacaccttgtagagaacagaatgtattacagaacacttaacaacgattgactatggcaagcagattgattacacccgtattggaggagatactgaaatcctatcctctgtattcacaggacggcaaaggcaaggatgccgtttgtgtggcaatattcttcatcggacacgtccgttggttcgtacttgaaggacagccggaaggtaacgacaccacgttgttcaccatcgtatgcggtctgcatgaaacggagtatggctatacctccgtcaatgaaatggagagcgtaaaggtggatggctccaaatatggagtggacgagatatttcaagtggagcagttggacggcttcaagccggtgaaactgaagagcattccagacgaggatttacaagcattccttcataatatggaatgaccccaaattaaatcagccgcagggacattactccttgcggctgactattgttagtacctactatgagtagtaaagcctacgattagtatatactacgatactactctcatcttcggaaagcggacttggcaacgtgctcctcttgtacctcttccttctggtactcctccatgtcaagcagttgctcatacgcagagctgatgtttgcgtccatagaatggttgtggctgaaagggaaggtatgcttcacagagagtcctgcattggtcacagtccccacatccaggctatccttatccttgttatattgcaggttcagcaaaccaccattcggcatttggaatatcggcatttttcgctgcgccaattccgaaaactcttcggcggtcatctccctcgccacagccttcacgtcctcactggcacgtcctatgccatagcgagtgatatggtcacgcacttcttgctccgtatgcttcaggaacacctcatacgtaccgccgacactcccgttatagaccactgcaaagtccttgtcctctattagcaggtcatcgcctctgttctggcacggcttcctgtaggtctgctcctcgtccatgccgttcccgtcatagtattccttggcaagcgtcagcagtccttgatagtcacctttctcctttagcttatccagttccgatgtgtcatccgttgattggagataggcgatggaggcataatagacgttttctttcgattgtgaaggctctgtcaggcttttgtactgggcaaaagcctcctgataattggtgtcaaggtctttgccgtggtcgtaaggaacagagagtttcacttccagaccgttactcgtcggcacagcaatctttacagagtcctccttctcatgatgctggatatatacagcagaaccattatatgccaagactgcatggtcgccgtcatctatggatagataacttttcccttgcccgttttcctgctcagcctttttctcctggtctatctccatagcaatcttgtcgatatgctgcgtgagcattgaggtagcttttttcacatcgagtagcgtggtcttgatgaactgcggcgactccttcagcgaatccagccaagacttcaaataggcagccgaatctcctttcagatgctttgtcatgccataccgctgagcggtcagcgcagccgtcagttctgccaccagttcctcgcgtgcatactctgccgagccgaaggtagcgggcttgatgcggtctaactgtccctccgcacccgtggagtgtcccatctcgtggaaaaggttcgagtagaaagactccccatccttgaactgccttttctcaggcatcacaatctcattcttgctgatggagaaataggcggaatcaccgaacatcggtttgatgggacatatccaacggttgtccgctatcatcctatccacgggttcaaaggcaaactgctcgtccttctctaccttgggcatcgagtattcctgttccagtttctcccaaaactctggtctgacctccttcaggttggtctgcgccacattgaagacatggtaagtctgaagctttggatatacattgtacttttcgcgctcttcctgagagagcagtttgtagtcctcccacttgatgtgttcctttgtttccttattgaccaccgtaaacgtggtgagcatcacggggaaagaatgctcacctttcagtactgacacacggggcttctgttcctcgtctttcttgccagttttgttaaactgctgtatgcggtcgaaggtacagaagcgaggaatcttgtaaccctccttctcgcaatgcaggagcaacatcatagcgttcatgccattatattctcgtccgttcaggtttttcggccattgcaacgcaccttcagtaaaccagggctttttccatccgtctttgcccgacagcgactgaatacgctcaatcatcatatcggcaaacaggtcgagtgccttgtcttcggcactcggaccttccttagcataaggctttcccatagtcaattaaccattatagggctgcggaacatattcgctcatttcagacactcggcaggagaagtccagtttgtcattgaagacactgacagacaatgcccctttgatgttcgctttcacgcctggttgcagccatgcctcgcatttgccatcgaataggaagaaacttacccagatgtattcaaatccgtcctgtactttctctgcgctgaaagcggagaactggcagtacggcacaccattcttgtccgtcttgtcctcaatgctcttgcccaccttgccgcggaactccatcacgcccttgatgcagtcctctgcctcgtcaggctggtggctgatgctgcttgccgacaggttgaaataaaggacatcgccccattttcttggtaccaatacaccggctacctcaatgcgttcgccgatgttgcagctgcccacctccgtcagtgtcccatctttgatgaccgacacctcgatggtcttgttaatcccgctcttcgctggaatgactacgttcatggcaaagctcacgaatgccttgccctccttgttcgtgcggcaggtcgcagccttgctgaccgttccgcacactgttacattacatttgatcattgctcgatactatttgaattatacatatccatcgtccaagtgaaatgtcttagcaatgacaataatctcttttcaatcatcatatactagcgcacgtatcagttcatagactatccacgctgctatgataagttggaagccgagatagatgatggccacggtctgaccgaaaagccattgggtaagcatgaagtgtcctgccacagctaccatacccaccagcaatgtacacagatgacttgctatccttttcatttcctttgcagattttgttgttgactctcagcctccatcccttgctcgaagttctgcgaagcctgctgtgtcgccacgatgcctgtcaccattcccgcaatcttcgtccgtttgctttcttccgacagattggcattgcccaaaatgagcgacaggcggttcatctccgaggaggtcagttcacggtcaatcttcaccgtaccgctctctgcatgaagcacagtcttgccgttctcacccacagtaatggtgcattgcctcatgcctggaacaagcgaggtcaaatctacgagccggttggctgccatggcagagataagtcctttttgtcgttcctcatcattgctgtcaatctgcgctgccaacatcatcagcgacatgaaggtggtcatcgccatgtcgagtatagggtcattcgttcccgaaatgcccacgccgctgtcctccgaggaaaggattttcttcatccagtcctccgacgaaaccttctgctcctgtggcgcattgctcttgtattttgccaacaggtcattgccgttatgcagggcctgtagcttgatgttgcctttctgtccgatttctgccagataagcggctggatccatatccctttttgagccgtcagccgatacactcttcactccgaaatgcagatgctcgccagtggttctggtgccggtatttcccgacacccccaacttctgactggcattaaccacgtcacctacctttactgctatgtcagacagatgcaggtaggagcattgcaccttgctgccatcctcacggctgtattccacggtgacggatttccctcctgccgtgttcgcattatggttcaccgccaccaccttgccgccgttctccgtggccaacaccgcctcatggttcgtcttgatgtcaatgcccttgtgcatctgctgcttggtggcatccatcggatcctggcgattgccgaaaggcgaggtgatgaagagaaactcctctcgctccacaggaaaggaatacccggcagactgcggtacatgggcagcaggcatttctctacgaggattattctccaccccgaacgaccgaccttctgcccgcatctcagccatcacctcactgtcatacttgtccagtccgttggcttcaatgatgcgctgcagacttgcagcataaccgccgcccgtggcatagccggcacgctcaatgcccttcgtccatcccttgtagtcgtcaggcgacagcgtgaagcactgcgcataacgcttgttctgcttcaggaactgcgagtgatgctcataactgtcacccacgcttttgtacttacagaatttctcgttgggcctatcatccgtatagactccatactctccgccattcttcaaccacgatgccgtagccttgatgccaaagtggttgttgcattcgcgcgacagttggctctgtccgttgctgctctccagtatggcttgcgccaagatgacggaggcaggaatcccatacatccgcatctgttctttggcttcctccgcatattgtgcggcatacgctgcgttctttcccataagcctatctccttagactggtgtgttgttctgtttcttgactttcctgtgccatctgctttcctgtctcttttccaggtgacaccatctccgtaattccacgcttcgatgatgttgtctgcttcggcatttccaactggtcacagatggccacccgttcaccagcacgaatgagcttcggcagataggtgtcgagggcatgatatgggaatcctgccattgccaacggcttgccttcatcatccttgcgcccattgctctttgtcagcgtaatacccaatattttggatgccttcaccgcatcatccttgtaggtctcatagaagtcaccgcagcgaaacaaaagaatggcatcaggatgcttcttcttcaagtcaagatattgttggacaaggggagagacagcagccttgacagccttttcatccttcttttcttctttcttttcctcttgtttcttctcttccctttgttcagagcttttatcttccttaagtaccacttccttctgttcatcatgcttatcgacaattgccgtctccgcttgcttcacctccgtcgcttcttcctgcttctcttgtgtactttgctcgacattgttgtctttctgcaatacatcagcaaacagcgaggcggcaaggttctgcttgtaggaatccctgtcaggagccacccacaatcgttgccattgtgacggactgacacttctcggctgcaacttcttgccgtcaatagtggctgcacacaggcattcgcccgatttggcacggaatactgccacacgctggatgcggttcaaatcaacctcctgctcattacctccgaagatgtccaccttcaggtcgggtttcgcctctgccatagcataatacttctgtgccagttcctcacgcacacgctcgatgttgtccatcgactgcttcaaggtggtgaagaaatgattgaggtctcctttgtcgggatagacggcaaagccctccttaccttcgggcttgatgtacaatgcccaccgctccttgtcatcctttaccaactgcacattgtcgaaaccgatgtcacggctgtgggttacggcctcagaagcatccaacgaggataggtcttcgatagaccagttgcgcagtcttgataccgtgattttcttgtcggcgaaataactgtcgtcgggacggaagcccaaggctccgtcgggattgtagaaacgcacgttgtcataaccctctttctgcaaggcattggtgaagcgttgcttgttcatgcccttgatctcgttgttcacctccaacgatgcaccctgtggcagcaccacatcggcggtcttgctggcatcatcacgcacgatgaccacagtacgctgctcctcgttgggatgctgcttgatttcgtctgctacgaagtagtggttgggcaactgcacctgtatctgcgccgtctctcgctgatgctggtcggtggcatactccaccttttcacccagttcggctttcttcaacaccttcagcgcaccgttcacctcactctcgatggcatcaatcagacaagggtcttccttcagttccctcgtccaatagtccaccatgctaaggctgtcctttgacagacgggcaggcagtcccagttcgagcatcttcacgcccgaagctatctcagtgatgagtcgttccttcttcacggcatcctccgacggggctttgccgttcttcatgaccatgccctcacgtgccaaccgctgctgatgaccggtggcagacaccaactgacgcatcatctcctgtacatagtcattgtagtgctcgaagtcacgctgccgtggcaggtagatgacatccttctcggtgtcgtagtgcgccacacccgtgccgtcctgacgtacattcacgaggttgtccttcatcttctgaaggaatccgttgacgcacccatgcagctgcttgtcctccttgtcgccataacctctatcctccaccgtgccatccttcttcaatgccgtagtgtaggctgtttcgttagccataggcagtagcgtctggtcgatattgaacagcacacggatctcacggtttttcactcccttgtactgctgtttgtcctgttccgacagttctgcgtatgcctccttggtgatgacatcgtcgggattgttgcggttgacgtacttattccaattgtaatacaggaacggcacacctttctcatgctccctcacgctctcaccccgtgccttcgcttcggagaactgcgtaaacagattgctcttgcaacccttggcatcggagtcaagggcaaggacaagggcattgaacggactgaccgaaaagcccttgggatagagcttcggatagagtttgccgcttgcattcaaccaatgtcccttggcatccaccgcactcgtcagtgcctcagtgagcagcgacacctgcttctccgccgtccgcttctcaaattctgatttctctttcatgcttttatctttttgtttatctcaatcacattctataattggcttaccaagccaccgttcccgacaattttgttgtcgggcttcactgtattcccctcggtcgcaccacgctctcccgtgcctgctcttcgtactgcattgctgccatctgtcgcatctggtcgttcttggcaagtatggcgttagccaatgtattcagcggcaatgcccccgactgatgcgccccaatcacactgtcaggcagttgaatggtacaaggcacatggtcaatgttggcaacgagacaccgcccttgcagcatcgggttgctgatacgaggattgagtggttcatcaggatattggcggtactgaatgcgagatgcagcaggactaactgtaggtgcaatgccttcctgctgtttcctgcccagcacctcatgtcccgctttgttgagcagattggcacctcccatacccatcaacagcatcttcagtataggattcttcacgaacattccagccacgatagaggccaaaggaaggaggctattgtccatattcagcgattttgtcttgccagtgaacagtcccaccagtacatcgggcagcatcgccaacacataaccaaggttcttgccgatgtctgaaaagccgttcagtccaaaactctgcaacagcccgtcccatccattttcgtttgtttgtaaggctgtttcctcctgctggactacagatggtgttgcctcttcagtcgatgaatcaggagtttctttcggttctgccttcttctccttctcagcctctgcatccagtctcgccttaacctccagatactcgtcttcctgtccaggcgcaactatcaagggcacatccttgtacttgcctgtacgtttggttgcttcgtttctctgagggtcaaggaacgtacctttgttccaaggaaaagaggtctgctcggtttgtttcgtccaatccataaaagtgatattgctcgtgggaatcttgttcttgaaatggctgttggtagccttgatatagctgttctcgtggttcttgatgacttttgcctgtttgcggaatgaggcgaagacgttggtgcccgtaccgaaaactcccttgctgatacactcctcgacacagacctcttggctgctacctttcttgcttaggtgctccatgccgacattcatcaccatatcgataccgacaaacttggcgaaggttgcccatgagccaatccctcccatggccacgacatcggcacccgctccggctgcccatcccgctgccttctctgttcgagagggcttataggctgcctctcctttggcttctatctctgcggcaaggggtgacttgttcagttcgtagggcagaccgaacagactgctttgtgccgccttgcggatgatatagtcggcagaagatgttggcatacggtctttcaccattttttctatcatcagctgctccatgcggtgatcgatataggcgtatgccaaatcacaaccgagttgtttagagagtgcatcgtaccgctctcgtcctatctccgtcaccaccgccttgcgccattcctcagccatcacggcaaggtcacgctgcatatccttgttgccgacaatagcctccttgcacatcgccagatagtcttcggtggtcttgctgttccacttgcctgtaatcttcagcgtggcgtatgggtcatcaccaggcatattggcagtggccaatgagcgtaggatgccagccgtactgttggagtaggctcgcatctcgtctgcctgtctgttggacaagtcccgttgcaccctgcccatcacgggggcaaggtgacacccgaagtagtcgcccatcagacgctctatctctgcgaatcgctgactgttcttaactgccatataccttgtttatatattatactgctgtaatatctgttcctttgtctgctcgatggcattgtgatatatctccatctgcttaggatagtgttcctccaaccatgcgtccttgtccacttggcagtggatgaactgcacggccatacgttcctcaatctccacggagggttccccctcttccttaccattgaaccatgcctttgtccaccatctcacgccagcccggtcgggatagacgctcactatcctcggaatgtcgaagctctggatatccacgtccaagtcggcaagagggtcgatgatgccgtcatgcgtcagggcttgctcttggagtttttttttaacacctcgtccatcgtggagagatatacctgatgtcgcatggcaagatagttgagaaagtcggcaatgagcaggttatgcaccttagtcgccaaaggcatacagcggttgccgatgcccaagggattagccatgctcggcatggtctcgtagaaataatgcttgctcgctcccaacgagaagatgtttctcaacgactgctccgtatgttcgggcagagagtatgctccttgttgaaggtcctcgaagtaggagggaaggaagcggagcatcaatgcctctatctcctgacggtcggtgtcgtagggtgaagggatgttcatgtccagttcattgatgcccatttgggaattgtgctccaatgccttgatattgccgtagagcatggtgaggaactccaacggattgatttcctctccgtcaaacctcacctccatgtgcagcaggtcgccactgatggcgatggtctgaccggccttgacgctttgggagaagttggcgaagacattggagagatgcctgtaagtcacttcgtatttgccgtagcggatggtctggtagatgccatgctccgcgtccgacccaatggcagagacggttcccgttgccaccgccgacagcaggtaatggttcactgagaagtctatgccgtgatggaagaatgtttctcccgtcacgggatttttctgctctccgtaacccaaggacatctgcacgtcctgctttataggctcctcaaacggcatacagtagccgctcgatgagcgcagtatcatttcttctgtatatctcatatcactgtatattggttatcgtttcatccctctgctttgggtctctgcttctttcatgttctgcccatgtgaagacgtaccgcctctgttaggcagagtttgcgccaccttagaattgttcccgatgatcatcgctccaagcagggcacccgcaatcttgctcatccaaccaaagcgtccgaataccatgaaggcggcagccaccagtccgacgatgctcatacccgacacgttgcccttgccgatattgccaaagagattgcctatcatgtcgcatcctacgcctccgaacatattcctaaagaaatcactgatgccgctgaactgggtgtccatctttccggctacagtgttcaccgcatcaacggcttcaccagccttgcccgtcagacgttgcacatcgttggcggtttgtgccaccgcttccgtggcattctcgccgatgacagcatcacctacgatgcgtgccacgctcttgtctgtggtcagcttctcccatgtcacatagcctgcggcactacccactgcggccgtctgcatagccttgccggctcccataagggtgcgttgcgggtggagtgccgcactgcctaaggtctttccagttactccgatgacatggccagtacctcgtgccgccttgccaccatatttcaataatgaactccaaaatcccatatcttatcgttttttaatcacggtttgacttcgtcttcttctgtcacgactcggcatagctcgaacaagttcggctctgctctcgctgctccatcagtttacgttcttgcccacctgcttccaccgcctcttggcagccgctgctatctcggctttgttcgctttggtgggtcttgccccttcgtctatctccatccaaacatcgcccatggtggtgtatttcaccgccctcgtcagtcgcttcaactgcttgttcatcttcttcagtttgggtcggatgccgaagactatctccacacgctccttctcggtcatcttgttgcccgacaggcataccgtgcgtatgtcattaactatctcgatgctgttcataatcagctcgcggtatatcttgttgcgcttggctgacagggctacggcaagtccgttggcaggatgggcatccaactgcgccaccaatccacccatattgtccaccaactgacctatctcgtgatagaaaccatatatctgtgcggcatagctgacgatggaacggaaggagtccagatagttgttgaactcccgctgcaggtcggtagtggcttccacttcctccttggtccagatatggccggtggattgtagcagcatcactttctcctgattcttcagttctttctccgccttgttggtgtacatcagaatcatccccgcaagagtcgggtcgttctgcgcccgcactcctgcaaaagatgatataaacataaaaatggcaattgatatgaaatacttcatgactgattcctttatcgttaatcactgatggtcatacgtcctgctctgcgccatctgctaagggcttgggtggctatctctccattgcttcggtctatcatccctgccgtcacgccgttccacacatcggtcatggtgtaatatcgtatagacagataaagacgatgcagcttcttgctgaaggcactcagcttgtcgttcagtgcccacagcgtcttgctcctttccgcaccagtcagcatgttctctttgcctcctttggcgactgcatctttcagcagtgtgaagacggacaccaattccgtggcggtctccatatacaggttgttcatcgagagggtggcaacgatgccttgcggattattgttgatggccttgcgcatcttacacaaggtgatgaatatcttcactccatcgtcgtacagataggtacaggctttgagggaagaggcataaccactggcggttttcagataactgttgtacttcttctcccattcgtgtatcttggtgaactctgcggcgatggtattctgcaacagggcagtcttggtctgacctttgatttccttctctatctcaccgttgatggcttcgttgccctctgctaatgccatccattccaaagggttggcagtcacaatctgtgcatgggctgacggcacgctcagtaccaatgccacgacaatgaaccaaatcttatctattcgtaatctcatatacgccctttcttcgtttgttcgtttctactcttgttcgtatcacactcaccacgtcatagctgttgctgatgccggtcatttccagtttcggtgtcgttctatccatcgacaacacggtcacgcttttcagtccgcataactgttgtatcaatgtctgatgctcggcaaagtccaccactcggtacaactccatgtagttcacgctccgctgaaacactccgtgctcacagatgagttgctcgctcccgatatggtagcggatactcctcagatagatgaatcggtagagtaaacagagggagaacaggaggctgaagacaagcaacagggtactatatgcacaaccgggcaatcctccgattaggagcattgccacgcacaacagcaacagaggcagttcgttgatgaaaaactgtccgatgctggggcacaaggtgatgatgctattatcttcttgtctcatacgcttctatgatatgtgttcttttcttctttttccctttgtttctctgccttgccggctgcgataaactcggcatagtcgaaggtatctggttcgcccttggcaatcagttctgctgatttcttgttgagcagcgcatcgttccagtccttgtagcaacccaatggatgataggcttgcacatgctcgtgacggaagcccatctctgctgccaccttcctgaagtttgcaacaaactgccgccctgcatcgtccttgtcaaaacccaaatagtgccgtgcgttgggagtaacggacagaagtcctcgcatctgtccctcggtgggtgtgccgcccgtagatacatacaccatctttacaggatttatctgatactctgccatggcatcgtaggcactctcaaaccatacaatttcgcttgctttatccaacggctcgcccgtgaggttggcaatccacagtccttcactgctgttgcttccttctgccttgcccttgtaaccgccgctaccgtccatcttcggtcgtcctcgttcctcaaagcccacagtcttgtcgggtgtcttgggcagtacaagcggaaaggcaaggttggcaaaggtaagtccatccgtccgatgcttagtagccagacagaaatgccgatgaaaagcatactgcgtatagaggtcgatgcctcggaacttaaaatagggataaaaccttttctgcgtttccctgtcctgcggattgaacttgtggatgtcgtagtcattcaggttgaatggctttccgtcctttcttggttctgtaatcttcgatggtctgtcctctatgggttggttgagcagtcggttgcagacgaggttgacgagtcggtcaggagacattcccaccttgttctctgaaaacatttctggatgctccttgatgaacgaaatgacattatacaccttctgctgcggtggttggaagcaacatttcccattctgcgtgacaatgaacttatcaccacgcacccgtctgccctcactgtcagtacgcacatacgacggataacgcaagccatctctcttgttcagatgataccctgcgtccaccagtacttcctgtatgctcaacctgtccagaaagtcatcgtatgtcagttcactactcattataaattataaattgtaaattatacattgttaatatcctctccttatctccgtggcaacatgatttgcttctgcctcaaagtaccttgccgcaatctcctgtggcgaatccactcccggtttgaagtaaggacgtggaccgccatgatgctctgcatagaactccggggctggatggtgatgatggtggcttatgtcatgcgccacctctgctgtaacgactgctcctgccgtcagagccgccaatatcttcgtgcccagtccggcgttggtttcggggcgtgtcttcatatccacttcactgaaaaccttggagaagagtttcatgcgatggtagtcatccaccgccaagaacttgtcgtagtccttctgcttgatttcgtgcgtgatggcttctccattgataatggcggtcatgcgatacttatcttcgcctttcttatctccctccatcggaggcactttctccaccatgatgtcaccgactttcacttcacgcccatgcgctccctcacgataccaacccttgttctcattaatcaaggcaaggtcttcacctctcaccatggcatcgccttgcaacacgtcacgtctgacagtctcgtcctcttccaacggaagcaaccgttcctcgtcttgttgctgacgctgctgcaactcctgttcaagttcgggatgcagatgcaggtcgatgcgctccttgctattcagtgtgtccatcaggattttgtcagcaaagtcgtccttgatgatgccattcagcagttccaagcgttgaacgacgggcacttccttgatggagttggaggtgagtttcttcagttcctcatctgtcaggtcatacaccatgtcggcattgacgctgttcgactgaatggtcagcgtcttcgcattctcatcaatgatgatgccatgcgatgccagacactcctgccacttctcattggtgaaatagacaggcgaggtaatcagttccttataaggcttggctggctccgtgcttctcgtgcggctgatggaaggcattatgattccctccaaatctttcagcacatcctgttgctgagggctataactctgttgctgtcccttataatagaacccataaccgccgctctgcaattcgccaggcttcattctgccgtcccaacgttcaggcacaatcggggctttggggaagaacaatcgtcctccaactctgcgaagatggaatccctcctgactgcgtggtgtccaacctaaaaagggtggtggcatatcgatgcgccccatccgtccatactcgccgataccaacacgatagccgtgcagccccatagctacacgaccgttggcattgcgtgcatgaacgaagttcttgggcatatagaagtcgttgcccacaatgcccgtaaaggtattgtaggctaacttgttggcatgattcgtaccccagtcggtcagagccaacatctgcttctcggtgatgttataggtaagcagcggactgtcatgcccttgcaccacaagctgatagccgctgccattactcaccacatgagcctgcataccattgcgcatgagcaagtcacgcatctctggttgcaggtccatctgttggggattcgtattctttcttatcgccatacttattcttcactcttcattcttcactcttcatttatcatgcttcaccgttctctattgccttctccagttcctcatctttgtgatggacaaactgctccgcactctcttcacaaatgcagagtccgttgttcagacaatagctctcatattcttcctgccattcagcagaatgatggttgacatactccaaccaaccgtactcgccgctctgtatcttctcgacgagcacatcctctggataatatttatttgatgccatatacttattatattatgtgtagattatttgtgcatggaaaaagaggcgcggttgcgctctccattcttcttctgctcattccaaagttcttccgtgtattcctcttcaggcacatagtcaagattaccgtcatcgcccattacccaacagccatagcacccgaaggtgtatttgtcccactctcgcttggtgttctccttccacttctgactgtcgccttgattaatccttatgccggtcttatcgttcaggtcaatacccaccgtcacctgttcgtcctccatgatgagcgtgagcggctcacccttctgcatcacggtcagttctgccgaactcagtttcagttcatccttcagcacctccaagttgcgcccgatgacaggcgtaggtaccgacatcacctgattggtctccgtgtcaatctgcacgaaagccttgctgctcctgccatcagcatccttaacatcggcaaggatagcctttccagccagcaagtcctcctgctgttcctgagtaaaagcctccaatggtgatttctccaactgcggatagaagaccacatccaccttgccgtcctccatacggaccaacgcaaatcgggtgcggctcttcaatgtctcgccctcatcattattcacctgaatgggcagcaacggtgaacgtcgtccctgaccaatatcttccaacgcccacatgggcaggtcttcaatcttctcttgtgtgagaccaaaacgagccagtgtctgataaggcacctcgctctcttcaaatcgtacttgcttcatactttaactttgaatttgaaattaaactcatgcaaagttatatacctattcagagacaagcagaattgcataagataatgcgtgttatttttgacgattattattatttgagtttgatttctgctcaaaaatcaaactcgattgctatattatgttacaatcttcttgtcttccctttgttctttatgccagtcaaagaattgcttgttacttttgcaccatgaaacgatttctactcatcacaatagcagcaatattctgttcatcagcaacagtatgcgctcagttcaataccgtcacacagactaaggtacaccgcaaggctgtgccaaaaacgacgcagtccgcaacatccgaacaactgcctccgtgctcgccgcatcagcggcgagactctcttgcctttgccccattacaaacccaaacggagcagaccgaccgccacacggcacttgtcagtccactccgtcatatctctgtcaccagccctttcggctaccgcagagacccatttacaaaaagaaaagccctacacaacgggcttgatttgaaggcaaattacgaacccacatacgccatgatgcacggcgaggtcatcaaggtaggcaaggacaaacgttcaggcctctatgtcaccctccgtcacggcgacttcaccgtcagctattgccacctctcccaaactctcgtcaccaaaggcacccacgtccgtcccggcatcatcatcgcgctgacaggcaacagtggtcgcagtactggtccccacctgcacctcacactcaaagacacaaaaaaaggacgagccatcgacccgtccattcttctcaatcttatcaagcatccactctaatagaacgccttgtcttttgtcgttcacatcaccccttccgcattgcaataatgtcttaaatatctaatcctcaacaatttctattcttgaaaaacaagtgttttattcacgaatataatatgatttcgtgaaagatgtcataagatgatactaatatctatgctatttgtcaataaagaacccgtttctatgcagatattctgaaacggttagtgttccaatccctatctgctcacacaacaaaggaagtttcttgaacaacttaccgtcattctgctgccttgtttcctccgtcattacttgcatctcttccagatggatagcgtccgagtgtcgtacattcagtgcataaatgatgatcttagcatcacctgttttaaggtattcttccttttgctctatgtattcttcttcagtcagttcctgcttcttcagtcttacacagaaattgttgtctatcatgttgctgaatctctctggggcacatggaaatagatcctttgtcggaatgaccaatttcttgtctttgaggaaaggcatcttttcaactgcaattcctttggaggtgcgttttgattcatccagaatcacatcaagtagcatcaaatccttgcgggagaacgcctcttccaggaatgagtacaactgtccgtccttatccaagggaagataattcttggcaatcatcaccaatgagcatgtatcaacaactatcgccataactccctctcaaaatttgctggtttgacattgagtctcgaacagaaagtggtctcgttgaccactccattgaaataggcatattgcatggttttcaagaatagcggagaaatgatgggctttggtgttcgcccgcctctcttctcagagtttttcaacttttcctgttcctctcttcttctgtattcctctgccaattcactcttgacattgctgtagctcgaatagctgattttcctgtcgatatacatccttgtatataaggcaagacggctaatgtgcgtccgtgcactgatagccttgaagaggtcaatgcagtagtcgttacgggaatctacacatgctatgttagcaagtgtttctgcttcttgtcccataatgaactgatatgcaaaatcattgcaccatctttcgacatcactgtatgaagtctgtgccgagatgtccatcatgtccaccgactccacttcttcaatccccaatagacaatgccccaattcatgcgccagagtgaatatttctcgcttgtaatgcttatgatgcttaagcactatcacattgggcttaaggtaaaaaccgtcaatgttggttttctctttcttgttccatgtctctatgtattcaaagacaaaaatgccatgatcggcgattttttctatcatcttcacaagaaactgcctatgattgacagtttccccgggataaaaaaaatctcttgcacgtacggctactgtcttagggtcatcttgtagggtgtagtgttctatgtcaaacttcacatccagttgcgacagtttgttgtatgcatccaaagcgtttttcagactctcgaatcggtttacagtacggatcgactccaagttcagctctgttccgaatgaggtcttgcggaagaagatactgctgcttgcattggttgacaacttagaatagtcttgaaagaaactgacttctttgtcgaatatctcacctatacgcttcaacacccccaaatcaatagaatctccactgatgtctgcggctcctgttatccgtttcctgcctttgttcagaagagacaacaagtcatccaccgacatcttgtataatgccagcaggtattctaaacgtttcttgttaatctctactttcatatcagcctcgattgaactattgttgttttgatgcaaatgcttaggcacaattttgcgttgcaaaattacacattttcacttaaatgggcgaattttcatgctgaatatcactggaatttatgtttattttgctaaatcgctacattttgccaccaaaaagacacaaaaataggacgaatcatcgacccgtccttttgtttttagcctttttcgttctaaccacagcctgcaatgttattcatcaactggttcatcactcgcatgtctcatttcgtaaactgtccataaggctaacacacattcaatggctatcacggtaatggccgcagtcatgccccaccagtgggcaataagcataaagatgccagcctcaatgcacaacgcaaagaggatggtaacaataagtgataatattctattcattctacggtaactgatttagcaaggtttcttggctggtcaacatgggtcaatgtaaaaagctgaggggtaaatttataaattgttatctttgtctccaaattcatagcttatggagttaaacggttatcgccttcttcttcctgaaggcactttagattactttgatcttgttgatgtgaaggaaagcgtaaatgaagttgtgatctatcttgaggagaaaaatatcgttcctgagaagtatacagatcaggatactgagagtaaaggcttttatgatcctgttattgttcaggattttcctcttcgtggcaagaaggtcttccttaatattcgtcgtcgtcgctggatcttaaagaagcataatgagtatatctctcgtaactggcgtatggtggctgaaggtactcgtatgacgcaggattttgcgttttttttaaaagaactatattgatagctatccgatcagttgcaagctcttaggtgttttatctggagttgacggggatttattggagcgtcaataccgtaaccatctaagtggttatctccattgggaccaacttgttcatgcagagagttggctactattcgaaaagaatatcggtgcttgtatctgtattgatgaggtagccctctcgcgtggggaactctatactgtcctgaccaataaagaagctcacggtggtaaaggtagtatgattgctatcattaaaggtacggacgttcatacggtcacttctgtcctgcttaagctatcccgtcgccgccgttaccaagtgcgcgagattactttggatatggctcctaacatggagcagattgcacgcatctgctttcctgcggccaaacgtgttaccgatcgctttcacgtacagaagttagcttatgaagctgtgcaggagatgcgtgtaaaagctcgctgggaggctttggatgaagagtccactcagattgcttatgcaaaggcctgtggaaagatgtatcatgcacctgttttcgctaatggagatacaagaaagcagttgttagcgagaagtatttatctgctttacaagaaggaatccttatggactcagtctcaaagaatacgggctgaaattcttttcaaggaatatcccgatataaagaaaggatattatctgtctatgcggttaggcttaatctatcatcagtgtaagtttaaggatattgctttgacaaggctggcaaggtggtatgatgaagtagataaatcagggttcctcacctttggaagggtcgcacgttctatacaaacacattatctggatataatcaatttttttgaaaggagggcaaccaatgccgaagctgagtgagtcattcaatgctaaaatcaaagcatttagagcacagttcagaggagtaagagatagagcttttttcttatatagacttgctaaattatatgcttaaatataaaatccctcagattgttacgttgacccgtcaacattcctatccttgttgatggcgatgtaataggccagcaactgcaatgggacggaaacaacgagaggtgtaaggcattcgggtacgtcgggcacttcaaggcaatggtcggcgatgtccttcattgcgtcattgcccttggtaatgatggcgacaaccgtaccgccacgcgccttcacctgccttacattactgattatcttgtcatacagcgagtccgttggagcaatgaccaccgtgggcatctcgctatctacaagtgcaatcggtccatgcttcatttccgcagcaggataaccctccgcatggatataggatatttctttcagcttcaacgcaccttcaagggcggtggggtagttgtacccacgaccgagataaaggaagttgcgggcataggtgtatatcttcgacaagttcttgattttgtcagcaagtcccaacacatcttttatatataggggcatgttcttcaactcccggacaatcctctctacggttgcatcatccacagtaccacgcatctgtcccacgcagagggcaagcagcatcagcaccgttacctgtcctgtaaaagccttggtagaagccacacctatctcaggtcctacatggatgtatgtcccggaatccgtatttcttgggatagaggcacccacgacgttgcagatgccatacacaaaagcccccttgctccgtgccaactgtatggcggcaacggttccgagcggtcatacttcctttgtaactccatacacttctcaaaggagaagtcggatgcctcaaaaagaggctggataaggtgggcgcattcgttcagcagtcccttgacgatgtggatgttcatctcgtggcagtttcggcaaattgcactgttgcagttgatataccgatgactgttgatgaagtcatccacatagcggtcataccgcttgccattcaaaatcacatcctgaagatagagttctctcgcttctaagagtaactcaaacaattcttctgctacatcctgttcggtagcgaagtgggtcaggtgttgcttctcttcaaaaaaagagaagactttttaatttgtttttgcatactaaattacttatttataagtttatgacgactgaaataccttaattccgcaacactttgatttaactttatttataagttcctgagcaacaaaaagttgctcaggattttgccatgtcagatttttcacttatcttagtgttgcaaatcaaaacaagcgtaaatcgtaacaagacatggcaaaggtacaaataaaatctgaaaaactcacaccttttggaggaattttttcaatcatggagcaatttgactccatgctttcacctattatcgaccagacacttggtcagagatgccgcagtatcatcggataccagtacagcgaaattattcgttctctgatgagcgtatacttctgtggcggttcatgcgtggaggatgtaacatcgcatctgatgcgtcatctctcgtatcatccgaccttgcgcacatgcagctctgataccatcctcagagccatcaaggaactgacacaggaaaacatctcatatacttccgataagggcaagacctatgatttcaatacggcagacaagctcaacgccttgcttataaaagccttggtttccactggtgaactgaatgaggtggaaacctacgatgttgatttcgaccatcagttccttgaaacagagaagtatgatgcaaaaccgacatacaagaagttcctcggctacagacctggcgtatatgtcatcggtgacatgattgtctatgtcgagaacagcgatggcaacacaaatgtgcgcttttatcaggctgagacccacaagagattctttgccctactggaagccaacagcatccgtgtgaatcgcttcagagccgactgtggttcgtgctcgaaggaaattgtcagtgagatagagaagcattgcacgcacttctacatccgcgccaacagatgcagttcgctctacgatgacttgttttcactgaggggatggaagacggaggaaatcaacggcatccagtttgaactcaattccattcttgttgagaaatgggaaggcaagtgctatcgtcttgtcattcagagacaaaagcgcatggatggagagcttgacttgtgggaaggtgaatacacctacagatgcattcttaccaacgattatgactcatcaacaagagacatcgtcgaattttacaacaagcgtgggggcaaagagcgtatattcgatgatatgaacaacggattcggctggaacaggctccccaagtcgttcatgtcagagaacaccgtattccttctgcttacggcattgatacacaatttctataagaccatcattagcaagcttgacaccaaggctttcgggctcaaggaaacgagtcgcataaaggcttttgtcttcagcttcatctccgtacctgccaagtggatcatgacagcaaggcaatacgtgctgaatatctatactgaaaaccgggcttatgcaagacctttcaaaacagaattcggataagaatcctttctttccggttagaatctgcgtattacctcaagtcgcatcgtggggtaaggggatggtggctacatattgatgttgtgctgttgctttttactgaaagctgctactaacgactcataaatctacccttaatcgtgtattggatgatagttgcggattttaggattttgtaaccttttctcccaaaaacacagctgtccgtttgccctcataataataattatccaccggaaaatgcaatatttctcccttttcgttataatgccagtcttgtgttccataggcagtaaaaacaggatgttcaaccgtaaaaactagcttaccaccagacttcagtattctatatatcttttttactaaaatctcataatctgctacatagtgaaacgcaagtgaacttaatattacatcaaaactctcctctgggaattccacatcttctatagcacagcatttatagtcaacctgtggaaaatgtgttttttctttggctacctcgagcattttatgagaaatatcaacacctacaacagaagaagcaccgtgttccatcgcataaatacagtgccatccataaccgcatcctaaatcaagcacacgcttatctttaaaatccggcagcagctttctcaatgtttcccattctcctgcaccggctagtccctgctgtgagcgactcatttgactgtatttttgaaaaaatatattatcatcatatttgttttctttcatctgaattcccctcgtttaaaaagttatttatctccgttgtaatttttttcacttctttataaagcttctcggtcatatcgtagcattcaaaaagtgaaagaccgagtacttcaaaaatatgattaaccctttcggcatatttttcaggtttatattcaaaagtttcttagatatcatattatcgcactcctttgctgcttattatctagggttaaacttaactactatttttctttgcgatataaaatacataactgtaataatctactactaatctaaaataaagcgattataagctatcctttttcctgtgtttgttttaaagttttcatctatacacttttttatcttttcctgttctttttctttatccataaccgttaaattttcaagcaaatcagcttcccattgtatttgaaaatcaagtccatcaattttagatggagtatgatggttgcctattataaagcatattctatcaatatttttgttatagcctaccttttttaatatttctttcgctacttctggtccttccttttcttgatagacaccatcaatagaaccgtattttttttgtgcttcaaccgcaccaatatcatgtagtatagcaataatactgatgaattctttttcttcctctccgatattttctccgttcattatatcttctgcatttttcaaaactttaagagtatgctctatgccaaaaggaatttctttgaatacttctttcatctctataataattttttctttaaacataaattgcctccatttataccttataggtgttttagttctatctatccatttttttgttgaccgatacaatcaacatcatgggatggcgcatttcatcctgcatccccggaatatccatcatgttttccggcggctgcggctccacaatatgatttattataaaaccatttgaaagcagtgtatttagatatgtggtcagtgttctatgatattttgtaaccttttcttattaatgtcaagattattttgaacaattgtgccaatatttttatgtacaattgttcaattatttttatcagatattttggataatgcagtagccgtcctgtaagagtttccgagaatatttacaatagtagaatgatgaacaagtctgtctaaaatagcactagctagcatattgtctaaaaatatttgattccagtcggatagattaatattactagtaactattgtgcttttcttttcataacgtctatctataagttgaaaaaacatttttgcttcttgttctccaattggcaaatatccaatttcatcaattataagaatcttgtatttactaaaatgttttattctatcatcaagtttgttttcaatataagctttttttaattgctctatcaaatcttggcattttataaaataggtacttactcttttctttgctgcagcaattccaattgacgtggcaaggtgggtcttacccacgccactattgcctatcaatataatattgctattattatctaaaaaacgtaagctttcgaaatctaaaaattgttgtttgtttattttaggttgaaactcaaaatcaaagtcctttaattctttcaggtgcgggaatgctgctactttaaccatagcgtgcacagcattaaaatttttaacttcaacctctttactagttaactcacacaaagcgtctacaatgcttagtttatgctcatttattttattaatatagtcatctatttgtaggctgatttgtgttaatttaagttcatgtaagttcttctgtaactgttgataattgttcattaaactttttcatctcctctaaatgtttagctgcatagtttttaacatcttctttatccgagtttctaaaagttaagctcatcattgctaagtgatgattttcatgataattaatttttttattagaaactgtatgtaaagttattaatttatggtcataataaacatataggttattatcaataactttaacaacaatatttttattaataaaatcaacggggacagaatatagatttcccttatagcgaaatagtccattggaattgactttcgcatgtattgttgtatttttgtaataagaacatattttatcatttggtagtggtaaaagatgttctttctcttttttaaatactaatatcggaggaatacctatttcctgacagactcttgaattagcttcatttgttatttcttgcatcttctcgaataactcttcctcattattaagcaatccattataagtcattatttcatcaataactcgcattggattttcaacttttactttagtatttggccttgctctaatgcaaggtacgatattaaatccaaagtcatcagcaaattgctgaaatttaggattaactttaccgtcagaacgttccgttctagctttatccatcattgttgaagcattatctataactatttctttgggcacacctcctaatgcttcaaaagcattagttaagaaatcaaataaatatgcttgagatgttgatggacaaattgcccaatatttgaacctagatgctgataatatcaaactgccaacattaaagataaactcttctccgtttttaaaagaaaattttaatttttctttccaatcaaattgtgcttgttttccaaaggaagtttcagattttacagcatctttctttttgtttggtttaaagtattccgcaaatttttcatgttttaaaatataataattaaaattacttcttgaacaatctaatcctttttctctaaccaaatatctatagagatgagatttataataaaatatttggtccgtttctgctgaaagcaaactcgaaatgatatcatagaaatcatctatctttgattttttagattttctaactttctttatatctccatcataatactttttaactgttcttctatccactcctaattctctagctatggcactaaaattaggtctatccaaattattaacctcgactaaaagttttagcttatttaaatcttttactgatcttaaaaatatttcagtattaatgtttatcatataaatcatattaatcaccattaatactgtgctaaattttaccttctattatacatagacatattagcaactctgtacattattatcttagcatttatacttggggagtagtgctatcaggagaataggcaagtcaaactgccaattacttaatattcggtgtactagtatgtgatattgccaaagttatgccctactttttgcgtgttgtaggactatttccacagctcatgctgacaatagtcctattgtctcaacagcgaaaaaagtagtttattgtctcaactctatcaaaaggcagactatgaagctattgtcaaagcaaaaagaaaaaggattccaggagactgctaatttcagcaaatctctcgaaatcccttattttaagcctatttctgtacttttttacttgtttcgagacagtagacataccgtctccacatggcttgagaggacagaatgaatgtcatttgagtacgtccgttctcggaaacatatccacttcgcttttggcactatcggtatacgggaacatatccaatctctctctggaatgtatgtaagcgcccaataacgaggtatattgaaaatctccaaagtcactcgactttggagattcttttctttatttacaatctgcttgtacagtttctgaccatggcaaataagcttctagagctgctttttttgcgaaagactcttcatttggcaacttctccaaaagataggtgagatatttctctgagtctaagccatttcgtttggcagtttctaaaagtgacaggatgatcgcgctagatttggctccttcaaaactttgagagaaaagccaattcttacgtcccatgactaatcctttaatcgcacgctcagccagattattggataatactaaggaaccatctgttaaaactgttttaaatgtttcctcatatttcaaggcataggtgatcgcacggcctaacttcgatcctgggagcactgattgattgcgacaccaatcaaagaacgttgtcatcaatggcgctaatctttctttgcgcttgcacaatctttcagctgaaggcagctcagcccaagaggcttctagtgaaaacatctggtcacaataggctaatcccttgcgccccaatgactgcttatctgcctgtttcggcgttgcttcaaaaaattttcggcgtacatgtgcccaacaacctactaactttgctttaggtagttggcgatacgctgaccacatatcacagtgaacatagccatcatattcgccgagaaattcttgaacagctaagccacttctgcgttgatcatgatgatagagcgtgattggctgtgctgcttgttttcctgacaggaatgtccagtaataagtcaagggagtctcattttctaaaactctataagctgtttcatccgcatgaagaaggtcttgtgttaataatttttcgtgtagtagctcatagagcggttcgaaataatactgactagacttgatatgccaattagctatctccttacggctaatcggtagccccattttctgccaatccgcttcttgtcgatagtttggcactttcagtgtgaatttctgatgaatggtgtgcgcaataatagaagctgaaccaagactatgcgccaagggcgctttgggtacaggggccttgatgattttatctgtcgcatttttcttgctacaggcaacacacttataggcatgctgaatatgatccactcgttttaactgtgcaggaacatagattaattcttgtcgttgcacacacgagccgatttcttttaacctttcatgacaatctggacaggtacaagcctctcccatcaattcatggtggatgacctctggtttaaattgctgaaaaatggcttgtcgtttgcctttcgcttttttccgacgataagtaatggtttcttcttctaagttacctgggacagtcactttcttcttcaggcagttccacgtcatcaaacaggctcaattgattctggttatagtcacgcttttcagaggatttaccataaagttttttggtaaggtaagcgacttgttcacgtaaaagcgcaagttcattagacattgcttcaattgtttttgtcagtctttcaatcgttttttctgatgatgacatcttcgttaactcctcaagatttttctttattatacgcgaaaaaaagccgacatttcaatagaaatgacgactttgactctctaaaattttaggtgtaatagaaaatcctttcattaaccattcgacttgttcaggcgttaaagcctgaacttccgtagtatttcttggccaagttagttgtccattttcaaaacgtttataaagcaaccagaagccttcaccatcccagtagagggctttaaatcgatcactttttccaccacaaaaaagaaagacggattttgaaaaagggtctaaagcgaattgtgactgaatgaggtaagccagtgaatcgattccttttcgtaaatccgttttcccacaaacaatgtagacgggccccagatcacttaagtttagtcccataagcgaacaccttctctaaaatttcatttcgttgagatacgtcaagtgatgagaaaaagctgagctcaatcgatcccactttacaacgaagtaagagctcatttttagttcgttgtttaaagtgttgcgtgccagttttgggcatcgctagagggacaatgggttgtttcatcataaaaaacctccaatcttctgtttgaatacagtataactggaggactagatagatgcgatacaccttgttattggacgcttacgaatgtataccatacttttaaaaggcagaatagcattttaacttatgctaccctacctataactaaacatttacagttgcatgtggcctattgtttttagccgttaaatattttataactattaaatagcgatacaaattgttcgaaactaatattgtttatatcatatattctcgcatgttttaaagctttattaaattgattttttgtaaacagtttttcgtactctttgttaacccatttcattacaaaagtttcatatttttttctctctttaaatgccatttttgctggctttctttttaatacaattaatgtgctatccactttaggttttggatggaaataatacctaggaatttttgctaatatagaaatatctacctctgccattaacagcaatgctagtgatctgtttgtatctaataacattttagcaaaaccatattccactattaaataacttattgtggctgaactttcaaaaacaatttttcgaattatatttgtgcttatgttgtaaggtatgctgccaaatattttatatggattgtggctaggaaatgtaaatttcagtatatcatcatttactatttgatagttaggataatttaagagcttattacgagttacctcacataatttagaatcaatttctatcgccgtaacaaaattacatctctttaccaattcagcagtaaaatgacctttccctgcacctatttcaaagatgttatctttttcatctaaacttatgcaattcattattttttctatgtgatattttgaagtaataaaattttgactatcttttatatttactttgttcattataacctctccttaatttattgcatctcttttcgaatatttactttctgcttgggtatgaaatactctaagccatacgtttcattagagagccgatcttcggcagtattctcgttcttgtaggcccgcatgacataccacagtatcttatccttgtccaatacattcaccatactgttttgacatgtgttttttgagaaaagaacgtactcatggttcatcccgatatgcgtatcggtctgtatatcagcaactttctatgtgtttcaactacaatagtcatctattctcatctttctgagtccaccccctgcaaagcccctctttacgacataaaaattcggtcggaaaaggtatgcaaaagatgtttctctctttaagagaaatatcgttttgctaaacagttgatattgaggtatcattttatcgtaaaagacatatttgctcaacaattgcttgacggaaatcaacaaattttagcatttttgtaaaaaagtcgctatataatttggtgaattggagttattttcatatttttgcatcccgaagagtttctcttaaagagagaaacacctttttgctcaacaatccccgacttttttattatagttgcggtatcacaccgcaatacaatagttataaatattgaaataaaggtgcagtgagacgctgcacctcctaaagagaattgatgatgagattgttggcgttgtcaacgacagaggtgtccaatgaggagaggtatatctgtgtggttttctcggagtcatgccccaatgcctcgctgatagtagatacgggcacgttcttgctcttggctatgcttgcccaggagtggcgggctacgtaggtggtcaggggtacggacaggcctatcatttctccgattttcttcaactgcttggtgatacggctataggcattcttgtactgtctccagaatatggctccctctccttttgctatagggagcaggtagggagaatcatctgttttgtacttcgccactatctcctgcatggcaggttcccatttgatgtgcaactgttgtgaggtcttctgacggcggtaaatgagcgtactgccatgcagattgcttggtgtaagttgtgccatatcgatgaacgacatcccacgggtatagaaactgaacaggaacatatcccttgcaagctccaaacgggggttcagactcaagtccagctctttcagttgcttgatgatttccaaggggagtgcccgcttgacggtcttgtcgatgccggtatatacatgcttgaacggtgaggaagagatgaccagtccgtcatctacggcatgattgtagatggtgcgcaggttgcggatgtagaaagaggtggtgttgcggcacagtccgctgtctttcagccactgttcatagccttgtatcgttgtcccatcgacttcctccaatggcacatcgcctcctttcaggtaacgctggaggctgttgagggtggttttgtaccttgctaccatccgcttcttgccgatgcgtctcagtttttcgttcaactccagcgtatagccgataatgccatgtaattcttttccctcatggaagttgtcaacgacggtgtctgctgtatatgactgcccttccttgtccaaccgtgcaatgaccaacagcagtttcttcctgtcagcatccaatgtatctttcaaggaaagaagataggcttgacgttgtggagtgacggaagttggcaaaatgatgtttgaatggtccgcatcccactctgaggaatagattctgtactctgtatggatctgacgtgccacacgattgtgtatcacctgataatacaggcgaccctctttctcttgaacagatgatgttctgaactttaatttgatggatgccataatgctctgactttaacattgaaattgcaattattacctttatatataatataagtgacagacaaacaggtataggagggatggtgcctcaccgctcggcatacaacagctgatattccacccacctccgtttcctaatggatgccactgcttttcccctccatttgcaatagctcagatagagtggcaggatgtccctgtcgccacgttccaatcgggtgagcagggacgctttcgggtatcgtccattgcctaacaacttggctggtccaatctggtacgagagggtggcaagcagataagcatccctgccataacgggcatataggcgcaggtgccggaggaggtctgtccgtaacagcaaatctgcacgctgacgtgtcagtgttttcgggaaacgctctcccttctgtagctggtgaccatagcccacatagcccggtgtggtctttgggtcgtgccaaccctcgaagtgtttggtaatggctaccatccgttcaaacagtgccctgtcaatggtttggctttgacagggcacgctacagatggccaacatgctcaatagtacgatgatgtatcttctcattacattattttatataggaggtgcgatgtctcaccgcactctaatcaatatcactacatcatagtgcggaactgctgaatctctttaatcatggctttcacgtcctccccaacctgaacgaagttcttgtagaggatgcgctctcgctcttctttcgacttgaacttatagaacttagggagagggacatactccgattcctccttctttatttccgtcatatcgaagtcggtcttgcagtagaacttggatgtcttgaactcctcgctctcctggatgttcatgcttccgttcatcccggtcttggtgactacgaagtcacgggcggtctgtccacatatccaacctgtgggcatatcggagattttgcttgcaggcaccaggctgtccatattctcattgaggttgatggaggtcttgtcacggtcgatggtcacgccctttttgagttgcactactttaccgaagatgtcactcgacagccattcgagggtttccttggctcttgccgaaccgctcaccacattgcccacggtggtgatgattttctgcatacccaccttgccataatcggcttccaactgcggaagttcctgaaagccaagtgccacgctcaccttgttgcttcgggctgtgcctatcagtcggtctatcttgtggaaatacaaggtcggcaactcatcgacgatgatgctgacaggaacgttcttgccctgtcctgtattcaccctcgttacaaggcggttgagaatcaaggcattcagtgcaccgatgatgctctccatctcggggtcgttggcaatgagcagataacttggattcttcgggtcactgaccttcaggtcgaagtcatcgccgtccttgtggaatatccagtaagattccttggtggcgagacgggaggtatagacacgtagcgtgccaatcataccttccaactgctccatggctttgttggcaaaggcagtctggaacgggccaagcaagggggctacctcgttgtcggtctgaagtacctcgaagatggtctgataactctcattgaggaacgataggatatgtggcatgtcgctgtacttgcccaaccaataagcgggctgcacctccgcgcccgaatggtcgaacacccgtcctgtgggtatcagccttttcgtctttgggtcttcacgccgctcggcaatcagcatctttccgtccttgtcgtagggctccttgccgtagttgcagaagaaatagatgcaggcggcaaggaagttgacggcagaggtctggaagaactggtcgctgccaccgccgccttccttcttgcctttttgcagggattcaagcagggtctcggcggtctcgctcgctgcggcaaggttgttgatgtacttcaactggatggggttcacacggcgcgaatactccacatccacaaagttgatgatgttgaacttcatgccatggggcatcttgctgtccttggcattcttgttcttcaagtaatgatagtagagtttggtggcgagagtgggaaacttatagtcgtacaccaccatggcaaagcccttctcgctgtgctgcctgataaacggctcgatgatggagaaggtcttaccagaaccaggagtacccacaacccatgtgccacggaacggattgacgatgttcacccatcccttgcggaacttgcccttgtaataatagcgcatagggatgttcacgctgtacttgttctcctgcaactccctgcattgctcaaagctctcattctcgaagttgaagcggtctttcagcagcccttccttcaggaacttagagatattgtcgagggcgatatgcaccaatacgacaccgacgatggaagtgagcatatagagccaagtgttcaaacggagggtatagaaacagggcattatcgaatgaccgaacagccatacggactgcacaatcagcagcactcccgacagcagcggatagagcacctgcctgcgagcgtcaaactccagatgcttcttgttgcgcgttcccacacaggtgatacatatcagcaggaacgtagccaccttgctatacacgaggttgccgtcatggtaaatcatccaccgcttgatgcgagtgtggatatccgtcactacgccgcccaagaagtccaactgctccggctccagtgcgtaggcgaagaactccatcaggatggagacataaatcaccgccctgaatatcttgtaaaaaccctgtaactctttgctttcttccatttactttacgatgatgttgggtgataatgagaaaagatgaaggatgccacggtggacaccctccaatcctcttatgagttttattcgtagccgttgatggtcttctcagactctactgtccacggagaaatagttgcagatatgacctccaaggtgttgcgtacaggcttcaatgaatagctgtaggaatgacccgctttccacgtgtcgtttgtgaggaatacgaagttctccccattgctgagttgcaatgtcatgtctggcataacctgtgcaggaacataaagcgtatattccatgtggtcactttgtgggtcgccgaaataataggtcgtcaccgactcgtcactgcattctacctttccggtcttgatgttgaaagtaccgctgtcaaaataaccgacgaacgtgagtaggcttcctgcaaaatcattggtggtgaaaccgtattctggtgaggtatagaccttgatgatgacacgcaccatctgatgggtgaagttcaatgtaaggctcggattggcgtatgatgccgctccactggcaaacagaaaatcattgaccttctgctcactctgtacagctgcctccggcacttggaactctatgaggtcgttggtaggatttgccgtatagggatagtaggcattgaaggtgtgagtgtctgtgtccgtgaaaaacaccttgttggctgacacaaactgattcgtgccgccgcttcgggtgaacttcatattgttgatcatccctgtggaagagatgccaatcatatcattgagttcccactggttgtcaacggctcgtgtggaaacggcaggttgcagcatctccagattggtgaatacctgaagctgcttggttgatgtgctgtcggtcacgaccacagaacctccgccaccgggcaggtaaatctcattgacgatgtcttggtcacaggacgtgaggagcatggctccaagtcccaacattagaaacaaattctttttcatgctttttcttttttaattgttgtactttgatgatgatacgggtgatactcgatgtctgtatatgggctaatccataatcgtgatgatgggtctcgccttatgcggctgccacttgggagtctcctgtatggcaccgcttcccagtgagtaaagccatgccttggcggtcgcttgtccttctacctccgttgaagtccaataccaacagtcatcatcctcatcggggataggtgtgccgccgcatttcaggatgtatgggttgatgatgtccttggcatgatagagcagacgcatctgtgccacactggggatataggcactttgcccgtaacgccacatgtcgaagacacgctcagccaaaggcgacttcacatcggtcgtgccataaagggcaaaagtgttcttgttgccgtcgtaggcggtgaggtcacaggatgtgtcctgttccacaccgatactgtcagcaaaggcttcgggagcgatgtcccacagatagacggcatatccgtttccctccatttcttccctctgattgacgttgaacaccactgcaatggcttgcttgcacgattgctcgtaggtttcgtagggcatcaccttgccgtcagtggtcaagatatgggtgaccttcatggctgtgtcgggaaagtcctgatgctcgtcacaggcagtcagcaacaccgttgccgcaactgccaagattgaaaacagtttcttcatacgcatagtcattttacaggaagtttcacacccaggacaatacccgttctgaacaggtcttcacccttgatcatcacatcggtcttcacctgccagaagagcttccagccgtgtctgagtgtatagttttgctcatagccgaggtggatgccacccaagaacctgtcagtatcgctacctgccgatgctcctatgcgcatgttgccatggtggttgcgtcctcttgccacacagggcttataggcaaagccgaaaccataactgcggtagttgttccaaaaactctcaggacagacatgaccgcacgatgcgcactcgttccacttgatatatccgtttgcaaaatactcccacgcattgtggtacttcgtctcatactcgtaggacagcgtcacgtccagtcctcgctcatacaggcatccgaaccccaaggatatgcggtcgctattctgctgcgccattgccggagtcatgcttgccataaaacagatgacaacgagtaaggtatgcacaagccaattcctcactcctaattcctcattcctaattctcattattcctcctccaacagtatatggttaaacgaatcggcagacagcacatcctcatagtcgatgctgagcgagatggtgcgtccacttatctgtttttccgacagctcgatggtcagcaccttgtcgttggggaaggtcatcttcttcaccacaatcacgttgcgatagccatacttgaaggtcttcgcatcgtccaacacaagagatggggtcagttccactatctgcgcattggtagccttgctctgcttcttgtccgatagtttgatgcgcatctcgtcgatgtcgaagcggatgttggtcttgttctccacggagaagtcgatgaagaaatattcgcccacgctgtagatgttgttcaggcgcattaccatgcggtgcatcttcgtcgccacgttgcggtatttggcagacgatgaccatatctgacgtgcatacttggtcatgtcggcagtggacaggcttacagcgggattgttgtaggcattgcgctccgagcattctatttccttatcggttactgcctcctgcatcctcgtggtatagagcagtgcatactgcgtgcggtagcgttccgtcacgattgtcactatcgccaacacctcaccgtcggcatacacgttgtccttcggcttcaggcggatggtgttgttgatgggttggtcgcccaccaccttgtctgtggatatatcgacaaagcggatgggttcggaggcggtgatgacggtggtcacttggtcgttgaccgtcagctgctccatctccatgtaggtggtctgcgccttggctgaaagcacgctcagcgaaagcaatgcacagacattcattttctgaaaacaattcatattagttgattttttgatgtttatactctatgagccaccgttcccgacaattccgttgtcgggcagtgtctatttccttttctctttcccatttacaaggtaaacaaacgtcccatacttcagcttcactttgttcttcttgatagccttgctgatggcattgcttgtcttctggtaggcattggtcacggcttgcattccccattgcgagaaactgttgttcgctccactctggtcgatgttcatgttgctctgcatagcaccgctcgccacatctttcgtggtctcacggaactggctgccggggacatacagtccctccagtccgtccgtgtcataaagcgaaagcgaaacctttatcagctcgtcatccacaaggatggagttgatgctacccttcactcgctgcgaaccgaaaccgctcatggtggcatagaggtacgaccctttcttcaccacggtctcaccaatctcaatatcgtccaacagtctcagccgcaccctcgacccgtccgtagccttcacgtcctcgtcaatgatggccttgatgagctttggctcatgctcgttctgcgtcagggtgttgaaatagtccgaagtcaccttcaccttcttcaccacctcctgtgccttgtcctcctcgtccagtgccttcaccgccttgctgtcctcggcaatctgacctttcacctcaatctgctccttgggaggcccagcctgtgtggtatcctgggccacgggggcaactgccgcctgtcctctcagcctcgcttcggcgagtgccttgttgagtgcttcgagtgcttccgcttctcgcgccttggcatcggccacttcggctgcatcgtccttctcttctgcctgacggacgagttccgcaaggtcttcttctgtgtacttggattcatacgcttctttctcttcttcgttgtcacgctcaatgttatcaacagccgaatagtctgctatgcgaccatacgacttcgccatgttctcatacttgccaccgatgccgtcaccattcttaatctgcgctccgggcaggttggggttcagaaactcggtggtctgcaggttcttgtcctgcgtttccgccacctccgtattgaacatgtcaaagacaaaatagcctgtggcaatcaacgggatgtacacgatggctggcagcatgtacttcggctgacggaagtttatcttatctgttattctcatcgctgtctgattttgatgttactgacttgtctcgattctcctcgttggttcgatgcgtcacgggaggagtgatgcaatgggctgcattcatcatctgcttcatgcgcccttcctgccgctcgatggcacttgcagcctccgtccgatgaccgtaataccgcaccatcctgtagatgttgatgccgaagcacgtggcgacaaagccgaagacgatgacgagaaacagcgtcttgtgggcattggcaaagccttgcaccttagccgccgcacggtctatcctcgcggtcttggcaaacttgcgccctgccgccacctccttctcataccgcttcttgtacttggggtcgttcttgtcgggcatatcctcgcccacaagcatccgtctgattccttttacactcataccgctaggatattagaagtttgacttcgacttctgctcaatatccttgttgagcaaggttctccagttcgtgatgagcagtccatgaggattgttctccgtcctcggcacgcgcttcacctgtcccgccgtcaccaattcacgcatcagaatattgctccttcgctctatcctttgcctaccgtagtaggtgaactccatcttctccttgttgaacttgatgctgtcgcaaaagatgctgaacacggcactcgtacccatgatattgttgtaaaagcccttttccttcagcgtattgtactgcgccaaaccagtttcatcgaccaaatacatcgccttctccatcgaatagcggatgtacttgtcatcgggagcaagcgtaaagaagtaatggtggaacatctcgatatggctctttgcctccacatccagcgtttcctccatcgtggtgcggttcaccagtatgggcacgttgccgtccaatacatacaccttttgctgcgcgtccgtcaccatgcagcgcgccgtccagatgctcgacaccgagatgatgatgcagcccatgaggaacgcagagcagatgatgcccaccagcttgattttgttttctaagttcttgattaccatacgttactgcttgtttgaggtctgatttctcttcattctcacatattcacggtgcaggatggtgtatatgtccttctcaacttcttccaccagtttggcgtaatacttgatgcaagcctctacgtagatgccttcgtatttcagttggatccacacccaccagatgtcacgttcacgtctccgtcgatttctgtagattttggcacgatgcaagcgataactcaggtaatctaccataggcactacatactcgtcgttatcctcaaagccttctgccatctcctcatactgtgggtcgatgtagttgttttcggaattgaaaaactcttcctttgcacgcttgttggcaaacgccatgaatttctcatctttgagccaacgctcaatttcattttttgctttcatttttcttgatggttacttttatttgtttcaataggaggtgcggtgactcaccgcacactcacatgttatctcatcacggtcgccatggttcccgtagccgtcatcttggcttgttgtgccacgccctcgccgaagtttcgggttgagaaggcggtgtcgccctctggtatcatccatgccgcaaggtcgggcacgaggttcaggcatttcaacgccacgatgctcgctgccatcagatagcctgccgagaagaacgagttttgcagataggctgccatcgtctgctcactggcggtgatggccgtcaggttctctacctgtatgcagagcacaatatcaaacagcaacaggacgtagaaaccgacgaagtagagcatggctccgtagaaatgaactgtcaaataacgggttagccacttcgcccacgctccttcccacttgggcagcaacgaaaatgcccattgtattggaccgaatatagtgagcattccgagcaatatctgctgacagtatatcgtcgcccaccaaccgatgcggaacacgatcagggctatcagcatcactatcttgtcgatgcccaccacggcccctgccgtcagtgaggtgaaccacagtttgctggcatccttctccatgttggtcacttcgtccacgcccgtctgctccatcgtcgcctctatcaggttggggtctgatgtgcccttatgcgccacgtctgcctgtgcctggaggtcagtgtacatcgagtccctgacatataccaactgctgcacctcctcaaacttgtcggaaatttgggtcgcctctgcctcatagaggtcgtgggtgtaactgccgatgcaattgggaatataggatagaaaatccaatacgcaccagctgctgccgctgttggtcatgcctgtgtcagcaggtgggtaccaccaacagaggatgatgctcaccaccaagggcttgaacagtttcatcacgtccaacggttcgttcttcaccatcatcttgtaggccatgcttgccgccacgatgatagagaacagtgccgccaatgccatacacatttggaggatccaccagaacggcccttgtgagcctgtgaaggtggcatcggtcaggaactcgttggtctggaatatcacatcgtcaatctcctcttcgaggatgttgatgccgaaatcgctgagtatgttgtctgccatcagtgcctggttctattgttgataatctctttgataaactctatgcctttcggtgtccatgacagatagaagtggtagaagcagcgcatcctgcctgtgacatataccgcaatgcccttgtcctgaaggtcttcacgcagtttccacattccatattccttggtgatgatgccttcctctttgagggtcttcacaatcttgccgtagtaacttccgacatatttgtgaagctttgacattgaaactacctctaaatcagatggcatataatgctcatcaacgatgggtgtcctgccgataacgctgattcgcttcggcatccttgacatctccaactgccacttgccgtttttcctcttggcggcatagagacgtaactgtatttttgatattgattccatagctatttctttattttatgttctttcgataacaggaatgactcccacgctcttcagtttctcatagaggaagcggcgacctttctgtgtccatttggtgttcatgcgcacatcctccgtaccgtccttgtgtttaatgaggtaggtctcgctggtcacataaccgcagtccttgtagtcggcatacagaatccactgcttgccacgctgatactggatgttcatctccttcagacgtcggttgaagcggatggacgactcgccatagtcctgtgctatctgtgtgaccaggacactgctcttcgtggcaaggatgatgtcaaggtaactcaccttgtccttcatctccgtcacctcctgttgcaggtcatccaccttggatcccaactcaacgatgcgtgtcctttggtgttcacactcctgttcgacaagcagacgcttttgtcgttcttccttcagattgactgctaaccgtatcaggaagtctggctctgccaatgccttctcgatggtctgctgtgtcatataggcaccatgcttgcggatagaggggagcacctccgatgtcacccacttgcggaaacgtttggcttcgggtttgcgactgtcaaggatgacatcatacagtccgtcttcattgataaagtttgtaacctgttctcttccaagactatccgagatggggtactttgaaagtacatcatccgaaagtcgttgtaccaacttgctggtttttagtccaagaactcttgccacatcagccaaacagaacaagggttgctctggtgttcctgtggttcggactgctccaaattcctcgttgttgaaaatctgaatatcgttcatatctctatgctgttttgtgattatttcttctcttcccttatttctatctgttcacactttcttcaccctcaccgctgttggcatcatcgccgtcagtgcctgtcgagctcctcacgcccttcatgttttcctgccaacggctcttggcatcgctgatgatgctgcctttatgtactacacggtcgttggtggctgccaagagggcggtagtctggctttgggtgttgagctgcacaaggtatttcagtagtgtctcgttctgtgtcgtcaggtcggcatagatgctaagatactgccgctttctctgtgcattgggcatataggcatccttggtggctttcacggcacactggtacatattgtacagttcctcccaccgacgcttgtcgttgatggtgcctcctgtagggatgatatggtctatgttcgccttcatcttgtccaactgaccgttgatcttgctgctttcggcaagccaggcgaggtctatctgtcggtcggctacgttcaaggcttccacctcagcacgcttggtgagggcagagtctatcttctccgcatcatctacttggttgtagaggttgatgccggcaagagtgcggaaacctaacttgttcttctctgccgctgtcttcttatagttgttatgtaacagccaataatagaactcaggggtgagagaaccgccacctgtctccatcaccgttatctggttctgcttggaggagtcgtggttgtaggtcacgctctgggctgtggctttgatggtggttgctaccgccatgatgagtatcattgtcttcttcatgtccgttcttcttttgtttacaatccgtcaatagtcaagttttcctgccactttccatcggctgaaggcatcttccagtatctcttccttcgtcctcgtccgatacaccttctccttccaatagcccatgcgcagctgcacataccgccatgtctggaagtaggcttggttcagatgtttttctatcaggtccaacgaattgttgatattgtccaacaccatcagcaggtcggaagttgaacaggctgccgctcctgtggcatacaacacgaggtcgttgacgctatggtagagttggcttccttcgttgtatatgttgtcgatggctttcttgttgatgctgatgagcatcgtgtcagccagttcgatgtgtttccgcttgatgaccttatcattgaagtcctccaacaggttcttgtagtcactgatgcggtcgctcaccgtctggtaggtgctcttcacgttcagcaccgtgcgcaacgactggtacatcacatcgatgatgtcgaaggcccgggtgtatttgtccaaatccacattcagttccttgtatttgcccacctcttcactgctgtattcatgcagcagttgattgctgtactccaaagtgctgcgtgccagcaagaggctgcgctgcttcttgtggtcgttgatgtatgcttccaccgataccgcatcgaatccccattgcgccaaggctgtattggggaagagggtaatcagcaggagagctatgatgatggtatgtctcattctccgttcctccctcagttttcgttctcgttatcttcaccattccctctgttagggtctgcattctctctccatcgctcgtagcactcttcaatgagtgtccttctgcgaccttggtctgcgtcgattgaaggaagaatgtccttcagcacgtcaatgatgctgcgcttgtagtgcatcattttttctaatgataccaagtcggcgtaaatcttggtgatacggctatctacttcacgggctatctccagacggtcgctcgaccagagcaggtgtattacatcgtcattgtcggcggtctgggttgcctcgctcttggcatattctgtggtgatgctgcacgacgggaactcctgggctatctccgagatacggctgttcacctgcctcgtcttctcctcgtcagaggcattcgggtcaagggtcagcacatccaccacctgtgtgtcggtgtattccgaggtcagctcccacgatatttgcagtatcgcacggtgtatcttgatgccaaggaagtacttgggcttccttgcaatggacagtgtcgccttgaaggtgataatgccgttgatgttgggcatggtggcagttcggacgtaggtgtagccgttccacgaaccggcaccttgccacgtgagattgtaggctgacttcacatcctgcatgatggcagggatgcggtagtagtcatcggtggaggtggcattgtcgttagccgcctcgctcttggcattctgtatgtctgccaactgctgctgccatgtcgccaattccttcttcaggttgtctatcttcgtcttgttgacattatgttgctgccgcaaggcaggggcttcctccacagaggcattggctatctgcgtgagcaggttcctgttctctgtctccaactggcttatctgcgcctccaacagggctatcttgctattcgcctcacgttccttctcgtccagttccgataggtcgagattattttctgatacgcttgtcctcatggcgcattccttgctgtgggcattgagcgaaccgccgcactcacggcacttgtactgcgtgctgccctgtccgagggtgacaccgtccgaacaggtgacgctgatggtcacgctctccacgcccttcagtttggcggcatcggtggcttgatagtaacggcgtgcgtcactgccgatgtaatagacatagccctcctcgttgtcgttatactccgagagacgtgcctgcaactgacgcttgaaggtattcaagtccatgctgtaggagtcgaagacatcctcatacacctcttccacgttgttccagctcttggtaacgtgtatctcgtaggcgtaggccttcttggtctgcttgccgccacggctgatgatgtacgacgacatccaatagttcatcgtataggtgaagccgtcgctctgggcgttgagctgctgcacacggctgcggctccatccggcatggttctccgagttggccagtatctgctctcgctgcgtgctgttagggtagaagttggggtcggaggtgttgatacgataccaatggtcaccgttcagaatactgttgtcatcggtcggcggatagtagtcacagaggcttacgctgccttggtctcgtcgggcaatgtaccaacgctgtgtatagtagttgccctgcgtctcgctcagatagtctgtcatccacgaggtgatgttgtagttggagaggtcgaagagggctgccacgttgtcctcgccacccaccagactaaggagtgtgctgccgatgccgttctctgcctgttcatagaggtcatggtagttgtcatagatgtcgatgattttactcaccttgccattgaaaaggtcgttgaaggcactctgctgcaagagtgcgcctgatgccccgttgatacctgccgtcgccaacgatgctcccatattgtaaagcgtctcgatgtcggcggtgaggttctccacggtgaagttgccgggcacactggcgatgtcatccaacagctgctgccaatctacattgcctatctccgagagtttgaggatggcggctatctcttggttgatttccaagaactgaatgtcggcaaaggtcaagctactgttggtcacgacactctcaaactgcatacacagcgactttgtgtcggcgcatatcttcatcaggtaactgccccagtagagggcggtctgcggacttttcagcatcattcctgccaccgtccatatcttgggcataatcttgttcgccaccatattgtggatgcggcggtaatagtagttctccgtgctactgctccaaatgccgaggtcggtgaatgccttgcgctccaagaacttggcagcgaagatgccggcagtggcaacctctgcggcattgtagtgcttcaagatttcgcccacctgctcgttataatagctctctgccatagctccagcaccgaatgcggcagccatggcggcaacgatctgcttgtcgtagttcacgctgtaatactgcgcatgaacccttcccacgacaagtgtaagacacatatatattataataaggtataaacgtctcattgcttcactactttacgtttttactactttcagtttctactattccactactttactacttgtagtatttactattggtagtattcactactaatcgtatttactactaatcgtaaatactacccagccaccgttcccgaaagttttgctttcgggcatctgggctttacgtctattccgggatttccgtttccatcaatcagcccccgtgctcgccgtgtcagcggcgagtggctccatcgtccgtcaaattgagcacatgccccgcctcattgaccttctgcgcaaatgccaacgacttcccgatgccactggcatcccaatctctgcaataccgctcgatagcctcctgatgtctgcacttcagttcatgcttatagagtttcaatgcctccttctcagctcgctcggtggtgtaggtcatatagcactcgtgcggctcctccacaccatacactccgctcgtcgatccacgtcggataaacacctcacggaagaaacttcttccctccttgttatccaagcggttgacagtgaatatcttcttgcaatccacatccgtcaatcctaatatcgccttgatctcgtcgaatcgctcacgaaatttgctttggtcgagcagcatcaccacgtcggagttgttgatgatggcttccttcacgatgggactgccgatgatgtcctgtatctcctgtgtcactacgcccacgctcgcccagaactttcgggctgtcttgtataggtacttgatgtactcggccatcagcggcgaggcgatggctttccatgcctcctcgatgacaaggcacttgcggttcttcttcaggcgcatcttctgcaggaacacgtccatgatgatgagcgtcacgatggggaagagctgcttgttctccttgatggcatccacctcgaagacgatgaaggtctcgtcgaacaaggtgctatccacgttctcgttgagaatcttgtcgtacttgccgccacggtagaagttttggagcatataggcgaagttgtcgcagtcgatggtggtgatgttgttctcgatgcagatctggtcgagacgctcacaggcgaactcatagaatgagtcgaaggagagggtcttcacgctcaatgccatgcgccgttcctccagtcccttgatgagtttctccaccttgtcgtgtatctgcgtcagctccgtgccgcgccgcttctccatggtggagaggttttttctcagtgtctccttctgtgaggaaggatagggctgcacaccgttgaaatagaaatcgtaatactccgtcaccaactgctccacgacacggaactccagttcgggtatctgcgtctccgagcctttccatatcagcagtatcaggttcttcaggaagtctatcttctcaatgttcagctcccgcttgctgatgttgaaggggttcatggtgatgggcttgtcctccgtataggcgatgtacttgccgcccacatactcgcagagtccctcatacgagttacccgtatcgaccatgacgatgtcggtgttctgctcccacaactgacgcaccacgctgttcatgtggaacgacttgccgctgcccgaaggacccaaacaaaaaaagttcgagttgtcggtcagcttctcctttccctcctttcctgtgatgtcgatggctacgggcacaccttggcggtcggtatagtatatcttcagcggggtgtcctcattatgcacgatgcgctccttgtacatcagacaggtggcggcatcgccgagggtgaggaatcggtcgtagtcggcattcatgccatagcagttgccggggaaagagttgacgaacagctccaactggttgtaggcccgcttgctgatgtggatgcccatgcgcgagaaggagttttcgagatggttggtgcatttctgtatgtcggtgtcgccgctcactgccaccacgaggttgtagtgggtatagacgagctgcttgctctcacgggctatcacctcctgcacacgcttgatgtcctctacagccatcaggttgctggggttgggcatggaggcatggcggtttttcttcttgtcgagtagggcaagctcacgcttctggttgggcacgaacaccatctggttgaacaccacgcagtcggctccgggcacgctatcgacgatgctcacgagatcaacgggcatactggtgttgttcacctcgatatttgcgtagggacggatgaccgacggcaagttggcataatccacatccacaaggctatacaccttgcagctacggtcccccatgccgatggtctcgtcatcgaccttgaagttggtcatcgacaccaccttgtcacggaagttcatggagaagaaacggtccacatactcgcaggcttccgttttgccgaggaatcgggacttcacgccggcatccctcagctggtcgtgcaccttgcgtatcttcaccaagaagtcacgccatttcttgttgtcgaacgacatcagacggctcttcttgttctcctgtgtgatggtgaggtagcagacgctgtcggtaaagggtctgccgttgaaatagcggaagtaactctcgctcaggaattcatgatttccaccgttctcttccttgaatgccttcctcacaaacacgtcctgcttgtgcagcgcatagccttcgcccaaggtctgggcaagggcggcgaagaggtgggtgaactcatagtaggcctcgatgttggcggaatacttctgcacagggttctccatcttcagaacagcggagtattcgcccgtcttggtatagagcacgccgatgccatccacttcctcgatggagaagtagatgtcctggaagatgcgcttgcgcttccctcccgtgccgaatgccttgacactgatggccatgcccacgcagatggctgagaatatgagtatgatgtatagggtcattgttctttttcttttttaatcgcaaaaaggcgggcgcaccctcatgcgtgatgcccccacctccattcacttacaatcattgatagctttccacttggacataatggattctcttttttgttttacactttctttgaataggcatagatgaatatgccgttgtcactcttcttgctgtgcaagcccttgcgctgcttcatgacgatgagaacgccaccgacagctacggcgaggactagcagcacgagtcctgccacgaaaccgaagatgcagtagccgaggatgaaacccgcaacggctcctcctgcggtggctgccgcccagtagatgtagcgtccctgcaacccgaagaactccaatggacgttgcagtcccttgaaaatgggataatccggaaaacgctcttgctttgtatctgccataactgtcagtgttttaacgttctacatactcacaatctcacgctgcgtttaacctccaatgccgaagaacagaggcagtgcctgggctgctgcaatgaggaaaatacatgcgccgacgaccatcatgatcttctttttcacgtcctgttcctcgttgttcatggcgatgtaaacgcttatggctccgacaattgcaacgacacctgcaatggcatagcagagcttcaccacgataggtacatacttggcaatctcctccgtcactgtggtaagcgcggtcgttcctgccgagtagtcgccggctgcgttctgtgccattgctgcggtggtgccgacaagcaacatcagggcgagcgttttcatgcgctgtgaagagaagaatcccttcaccttcttgttaatcctttcaaacattctttttaccttttaatttgttacactttgagttatcttatctcgtatcacctgtatctcaaatctgataaccgaagaaagcggggaagacgatggtcgctcctatgaggaacaggcaggctcccaccagcatcatgatgttcttcttcactccttcttcgcccgtattcatctttatatatatctgcaaggcgctgactatgaccacgatgcccgccactgcatagcacagataaacgatatagagcatcatcgtcacggcatagtcatgggcactcgcaagtgcgtccgctccccagctgtagtccacgttgccacacttagcactggccagagctggggttaaagcggcatataatgatagaaatgcacttcttgtttttgacatcatatctcattattgagtgattccaccttgaccatgtcacgtccattgtgacgaagaccgcgggcgatgatggtgttgttcaattcttccgaatacatggggtcggaataggtggtattcacttcctccatcttcttctcgattgcgctttgtatcttttcaagcacatgaggcttgctctcttccgcagtggcggctgcctcctctgtaggctctgcaagctgcttctcctcgtaggctgtctcatattggttgtcgcctacgctgaaaccaccgtcgctctcgctgaccgctatcgactcttcctcgtcggtcatgtcactgacatcaaacgactcgccctgtgacttctcgtccttgggctttccgtacagatcctgcacgatgatgaccgtatagtagatgacatagattatggtcacgacaatggcgaatattacaaatgacttcatattttcaagtttgattttactatggtttggcttattgccgatgcaaaggaactaccttttcttcaatcttaaaccgaaatgactttccgcggagccaaatcttaactctaattttgattacactcgcaatcatactcaaaaatcaaactcgaaaggcacaaaaaaagcccttccgatagggaagagcttgtaaagagggtggatgaaaaaaatgtggatggctatatggtcaggtacttgccatgggagaagtcctgatgttcgttagagaaaacatagcccaactggttggacaagcattgggtgttgcctatcctggcatcgatgttggtgtgcgaatgtccgtatatccaatagtctatgccgctatcggtgatatagtcctccaactctacggtgaacgccacgtttgccttgctgccttgaaactttgggtggagcatacggaacgatggtacatgatgggtgacaacaatcttatgggctgcttgcgaatatgccactgcatccttgataaaggtgaggcaacgttcatgctcagcattgaattgggcatgggtcatcagctcacctttatataatatacggcggaagtcgcttatcacttgctcggtgaagtaagcgtcctccaaaggaatcctcgaccaaagggtggagaggatgatgtcggtgtcgccaatcctcgcaataccgttgtagtggctgaatacattgggacgtacctccaagagatagccgtcgggcagtgtcgccacatcataatatttgtagaactcatggttgcccatgcagcaatgcacctccttgtagttctccgatgcccagtcccaaaagggatgcttggagtagttgtcatcgccgagatagccgatgtcgccggcaagcagcagtatgtcgcccgtcacctccaaggggtgggctttcagataccgccaattgtcggcaaactccagatgcaggtcggatgcgtattgtatcttcatattggtcatgcttctataaacaattcatccagttgatctaacagtccggtcacaaatgcctcgtcttgaccgagtgactttgacaatggttctgcgagagttgaccagtcggctctgatggaggcgacaaactcccttatacatgccactattgaagcaggagcctcaatgttgtcctcagtcattatgaccacatttttcaggatgtccgaacggtgcttcttgatgtctttggtgttcacatgcttgccgtcccgcttgtctgccatgagatttaggtaggctcttgccttcagtgctatcaaggcagcggaattggcatggcgtatgccatcagtcagttggctgtgtgcgatagtaaagtgatagtaatcatcgtccatgatgatggcactaagactcgacacatcttcatcggtcgggataggttctatgacaaatccctttggctctccaagcacgtcggggtggcgtgacagcagttctatcatctcgggatagccgtctttaccatcaaggaaacgatacatttcataccttggtggctcaccagcctcctgtttcctcttttcaggtcgatagccagcctcccgcacaaactgccagaagcgattggcgaaagcctcggtcatgttctctacgatgactatcatgtcgatgtcgtgtgtggcgcgtggacgcaccacggtattggtcatggtgatgtcacaggctgctccgcctatcaccacatagttttctgagtattccgcaaatgcttcacggaacttgactaatccttccatttctgttcactgattattcgttctacttctttttctactctcggatcatcatcatctctcaacgaaaggacaagggaaaggcgatcaacccactggcttttgtcgcccattttgctgacaacagggtatttccatacctctatgatatagttgccgtcatagatgttgggattctccatgacatcagccgacttgacggcacgatattccttgcttgtcatcattatcatctcttcccggtcacgattaagcatggaataatgtgccagggcattgatgccgcatacggggtattccgcatccaagcgtatgtcatcgcaaaagatgcggttctccacaggtgacagcaagacgttctgagccttgtcccacagttccttgcccttcaactcgaagtgtaccaccttgctgcgctgtccgttctgaatcttttgacacagtcctacatcttcaagacaggtgacacccaacgtgacgctttcgtaagaatatggaagcaacggtgcaatatcccttggcgacattccttcaatactgcccacctgtaggtgatagagtagtatgtattgcgccacaggggtcaatacttcggcaatcttcctgttgcttgtcttctccaatgctatgatgcctggcagatgggcatattcctcggacatgacaaagaagactcctttgtctgccagtctgtgtcgctcgtaggtgggtccgggcgcaaggataaacaccgcaggcagtcccagggcttcggtcaaccgcttgcccgtgatggcgcaagtccgtggagagggattgcccttcttgggctcaacgaacagcaggggcgtgccttggtatgtgccatcatagaaacggtatgagagtttctcgccaaccgtgatgcctttcaggctttccttggcacgaggttccacctcaaagcgtctgcccaatatccttatttcttttttcaattccattctgctacattttaataatgtattaaaacgatgcaaaaataaggataataattgagaatcaagcatgtttgggcgaaaaagtgcagatttgatatgtaatttcaatgcatttgagccatttttgcatcaaatgatggtgttttcgtctttataatgtcattcagatgccgttcgtttcttcctcatcagatagtcgttgacatccttgtagtcggcatatctgaaggactcgtccgtcaccctgtactcgaatacattgctgatgctctcaaccgtcttgcgtcctgcctggtcgttgtcgaggaagcaatggatgtgggtgtaacggtcaaggtattgcaatgctcgtttgaggttggcgactgagttcagtatcatatagtcgcaagggctttcaacgacaaaccatctatcttgctgtttgacgagggtcatatacgcaaggaaatccatgaagccctcaaaaaccagacaaccgctttgccactcattgaatgtatgggcaagcagggtgatgtccttatgtccgatgcagcccttgaaatagggattgcgcacctcgtttccgtcactcaggttgccaaaggcaatgccatagtaatgcttctgttcaaccttgtagtgtatctccctgcaatacatcctgccaatggtgatgtctatccgtcggctactgaaataggaaagcagcgaatggttgctcagtgggagcagcttcacatcgttcatcttggttgtcgtgtattccttggctgcgatggcggtctcgattgccttatccacagtggtgatattcttggacgcaaggtaggcaagggcatcggaaacggagtgtttgttatacatgcgctttaccaactccacaaggtcgccgccctccttaatggcgtagtcgtaccacaggttctcgtttttgctgaccttgaacgatgcggtcttctcgtccctgaagggtgacagataccagtaggcattgcccttcttctttttcagcgttgcattctccttgtccaggaagtctataatgctcagtttcttcgattgttcaatattcattgcatttcatttgttcggtttcactttgtccatgggaacagtttactttactctttctcctatataggcacccccgtaaactaaaccatttgctaaactacttttccgcttcccaattcagcctccgatttcagtttactttggccttatttcttatatataggcacggacgtaaactaaactggttcctgaactgtttttattcctcttcatggaacaggtcaatctcggcaggtgtatatccgaaatagtaatgattatcccgcttcactatgagcttttgctcgttcatcaggtatttcagcattttgatgataacgcttctgccacgcttgaagccgatgtctgcataggcttgcgtcaattcctccaccatgcgatcgaatcctttgataggtttctccttgaatgcagccgtcagtgcctcgttgtgctgttcgggtgtcaagtcttggtaagtaaaccttgacggttgcttgtcaccttcttccttctccggcgtgtgctcgacaatctctggcaacccttcatcattgacagtaaaggcaaacggtttgaactccttctcacggatgtgcatcgccttcacctcgctgatgtcgggattggtggtgctcttggtgatgacaagcaccgtctctgccttgttgttcatctcagtaccgatatgcccgcgcacattgttgtcacccttgttctgatgcaatacgcaatggatatgcaggtcatactttgatgaccattccatcatcttgttgatgacctcgaccgactctcccgcattgttgatgtcgagaagcaagtccctgattccgtcgatgatgaccagtccatagctttggtcttgggcaagcgcatagtctatgacctctattctgacggagggcgtgtactccctcagacagataaagtcaaggttctcgttgtcgatgcttgtaggcagaccggcgagcttcaggatgcgctccagtacgttgtggcagtggtagcggctctgctccgtatctacatacagtatcttgcgcttcccctctggcagactggcgcgatagttcagcaccttgccgttggcgagggaagcggctaccaaggcagacacgttgaaggtctttttcgcctttgccttacccgtggaagcactgaagttgcccaacgtggcgatagtggaattatccacccatattatctgcggcggtgtctgataggtgtcagtcgccttgatgagtgactcgctgaggatgcgcgatatgcgatccttgttgttcccgttctgcttgtcaagcattgcctttgttttttcttccatagcgtttctgtccgaaataaggttttacttcattcttgtcttctctctcgtcggtctccactttcgttaccgcaccgatagtggggatattgttttgtaggagccactggtcaagttcttccttgttgaagtagagcatcttgcctcgcggcttatagtgcggcacctcctgggccgccgtcagcttgtatagaagactttccgatacacccatatagacacaggcttcactgaaggtcagcaccttctttgtcgtgtagatgttgttttcaagcattgacagcctttcaagcaaatcctccacgggttccatctttttcaagatgtcctcaacgacacatacacgctcgttgattctttccataaatgttgttctgttctgcatgatgatatgctttttatcgtttgacataggaggcgtccctccagcagcactgtgctttcggagtgcaaaattacatgcaagaaagggcgtttgaataaaaagcagagtgatagttaggcagtctcaccctaactatcaccctttttacattcttatgttggattacatgtcagttgtatgtccttttttcatctgtttgatgccgtcccgtatgctgtgctttgcaacgcttgatgagattctcgccttgtacaatgcagacgacagatccgatgcggcaacgcgcttgttgttctttggcgatataaggaaacgtcctttctcaatcacggattgccagtcgtaacagacgaggttgttggtcagcagctcgtcaaagaacacggctacattgcgtaggtttctgacttctactgtaaatccggtcttgcagtggagcaaatcatccatgaccgctcttgcttccgtatcgtttgacaacttgaacagatggttgtcttgtgcaatcttcgccagacaatccaactgcaggtctgtgaactttcctccgaatgacatagaggtagcccttggggattgacttcctgtgcttgtagtcaggtgatgatggataagctcgtgaaagtcttcctttgtaaacgaatccttgtagagatacctgtcaagcatatccttctcctgcgtgtacaggttacgcacgatacccatattcatacgatgggcattgttgcagcaggtttgcttacagccgatggagtagtggctgtcacagaacaaatcaatgaaacgcgcttgtttcatgccgccgttcactaccttctccacatagagtttcttcattgaggacaatagcatgaaaagttcgtcgtagatgtcctcatcgcaacacacatgcttatgcgtgctgctcatctccccaaaaagagagatgaccgctttggtcttgtttcttcatttttcttttgttgtttgtttgttacacaaaaaactccggccacttgcgcaaccagagttgagttatacgaattatgtgttctgtacaatacggacacactcatttcagtcaaagagtccgttaacaaggtttaccgcttcgtccttcttccggttgacaatctttgcatacacctgcgtcatgcgcacatcggtatgcccaagcagtttgcttgtcgtgtagaggtcggctcccaatgtcagcatcatggtggcaaaggtatgcctcgccgtatggaaggtgaaatgcttgttgatacccgcagcctttgcccacggtttgataagcacatttactgcggcagcagacggaaggtcaaacacattgtcctgtgaacttttgtttcctcgctctggcatccaacgtaatgcctctggagagagaggcagatagattggtgccttggtcttctgcattactacctccagtcgtgtctgtgctccatcttgatacacgttctcccatttcaaggcagtgatgtcactgatacgcaatccgcagaagcaggagaacaggtaggcagccttcacggcttcattctgcataggagttgcaatgagctgccttacctcgtccactgtcatatactcacgcttgctttccggctttttgattttatcagcactgcttattctcgtatatggattaactttaatcaagtcctcgcgaacagcagcattaagtgcgccattaagtgcccgatagtagttgtgggcagtatttgccgcaagatgatccacatgtcttgggtggtagtctgtcctaagatagtctatgtaaccttggcagaaagctcggtcaacttggtcaagagttgtcttttcgcctacccattccctgataatcttcattgccaccaagatttgccgccaatctttctttccacgcttcttttggttttccatataggtgttcatccaatcaagcaaaagcaccttgggctcgtcttttgcctgtttgatgccagcctcaccatttgtcagctcaatgattctgtcggctttgattttattggcagcgaccaaggtggcttggttctgcctgcgagagttttcgtccgtttcggggacgatatacatcttcagatattcataggaacgtttgccattcctatagatatccaagtacaaacttttgtttccgttgcttaggtctttcatcctaagccggattggctcctttgccttcgtcgttttcttgttccttgccatggctattcgattttatgtcctaaactgggtgcaaaggtacgaaaaataatcgaaaacaagaaacaaataagaaacaaaaatgatgaaaacaacagaaataatgtgataagtcaagaaacaagtgcaaaaatagaagttttcagaaacacttatatatcagtgcttttatttgcagtttattggaatttgttttcattactgacctttagtttatgaatttcgcaaactttgaccaccggaatgacgaatagcaactaagacgtcctcctgatgtgtatttatatacatccgtgcctctttttgagaaaacaaagggaggttacgggtgttgtacatatcggcgtgggctttctgcgttgttcgttctcggtggtgggcattgcgaaggccttgaacatggaacggacgaaggtaagattcccacgcttttttatatattcctttcatcttacatttatccgtttacccggtgggagtcagggggacactcataggaagattgggcatgattcatgcgggacagcttatcgaacgtacgcttcacgaacagggacgcacagttacctggttcgccggacagttatgctgtacacgtcccaatatatacaagatattcaagaaggaaaatatcgacatccatcttctttggcgcatttcgtgcatactcgatcatgatttcttccgcgatttatccgataacatccgtatcggtacttcttcatgtgtatccaaataagatacatttctgtatcctatccggaactatgatttctcctgctggtatactcctttcgcatacctttgcggcatattaacataaaatcacaaaagaatatgaaaaagctgattctaattatgatgctggttttcggttgtgtcattgggacgtatgcgcaaaagactgtctttaagtttcgtgatgcgcaggcacgtgccggagatgcagtaaccgaagtttgtgtaaagcctacagttgtagaggtgaaaattcttgaagagaaaggacgaataaaggatgtatggacactgagcagagaagaggtggaagttgccatgaagggtgagcttgataacatccgtgcatggggaacttatttgtccactatcaagaacgattgtgatgtaatcatgggagccacttttaagatagaggatgatgaaaagtcgggaggatatacggttacggtcgtaggttatccgggcgtgttcaccaactggcatactgccacgacagaagattacgaatggatacgtatccagaaactttcgggtgccgatgatagaaccaaaatagcacctgtcataaagaacaagaattaataaccaaaaaacatagacaataatgaaaaaagtattatcaattgttgctgcgcttttgttgtgcgtaggaacacaggcacagattgtatcatccagaagtgcaatcgtcaagactcaaaagcaagcgagtaacacacaatggttcctgcgtgcaggcctgaacatcatgaacctcaacggtgacggagttgaagcggattcaaatattggctacaatgctacattcggctatcaaaagcctatgggcggtgccggagcatattggggaatggaattcggcctcggttcccgtgggtttaaagccgatgaaatgaaatgtatcgcacacaatattcaatattcaccgttcactttcggatggaaaattggagtagcggacaatcttagcatcgatccgcatttgggtgtttttgccagttatgactataccagcaaaatgaaagaaagtggtgaaagcatcagctggggagattttgcagattatctggaagtggattacaatcatttcgatgccggtatgaatattggcgtaggactgtggtatgaccgtttcaatctggatttcacttatcagcgtggattcattgacgtattttccgatctcgatggaatcaagactagtaactttatgatccgtctgggtattgctttctaattgagacacatagtttaatcatataaatttcagcatttgcgctcttttcttttgatggaaaagacgtgaatgctgttttcttaaacatagcagcgtatgataacaagactgagactttgggtaattgtatttttattgggtggagtactgccctctttgattgcacaaacttttactgaacaaaagaatacttatccgctcagtgcggacggcagcaaatatgtagtcaacggatttattcctttcagtccgatgatcgatgaaagtatttatgctaatgctctgttgtggactattaaaaacgtttgctctgcacagcgtgacggaataacagaagtaagcattcctgccaagagttttagttgtaacctggtgcttacttcccaggcggatgccaaacaaaagaatacgtactattgtacggcccaatttcaggtaaaagatgggaagctggtctattatctttccaatattcagatagaatcatcggtggttataatgaagaaagtcactccgatggaaaaactacaacctgagaagaagccttctcaccaggaaaccatggatgactttgtgcaaatagaatcgcagatgctgaacaaactgtttgattttgtcagcacaaaccagctttctcctatcacccattggaatgaaataaatatcggcaaaccggtaaaggggatgacagaagatgaatgcctgttggcttttggcaaaccacaaacaatctcagaatcaaatggtgaagtgcaatggatgtattccagctctttctatctttttttcaaaaacgggtgcgtggaaacgattataaaataaagaaaagaagtaatcccgaaattgcttctcgtgtcttatcatctttctattgatcggctattgtgtatgtctttggtaagaggaagtcagtgtgtgtgataaaatgatctgaaaagtagtgaggatttactagaaattctatcgcccttatgatgaacttgaacttggggagttgtgatttgttgttgatgtttattgttttagtgatagttcctgtttttaagcttaaaactttgacaataagcctgttttttatttttatttgatggtgatatatctgtgattgtgtatgaatatgtatagtgtttaagcttgctattactagttgaaaggataataaaagtgttgggtatttgagactttttttcgatatcttgttattatatatttgtgcacattgactctttgtttatcttaaagcggaacttatatttgagataaacaaaggttctatttgaaatgaacagacattttgctttatgctttctccacagtaattcaacgcgacttttgctctcatgccctaacagattgtctgtatgcctttattcatcgtagtttcaggtatggcagcaattgtggtagcagttatgagagcaagtgtttgctctcactcttccatgtatcattatctgtcatttgtttgatgttgtcatttgatttacagtgtgttaatgtctgaggtgtcaattcttaacgattgatatttcagacattaataattgataaatcatcctttaatagttgataactccgctgtttttgagtgataagtgatttattgtttcttggaagagtaggttaatcgaacagttggtgcggtcaagttaattgaatcatataagtaagggatcagtttcctgccttgtttcattcattccatcggctggaaccactgttttcaagcgtccgaaactttgttttcacggctttgaaactaaagtttcaagccgatgaaactttagttccaagcaggagaaacaaaagtttcaagcgggagaaactaaaaagctctgtatagaccaaccaacagcccataagtaaccattgacaacacggcagtgtgacagcaaaatttgccgtcacactgccgtcacctacttctgtcacctcattaattattcatattcaagcaattacatccgacaccgtgacagatgacagcaaattatagttttttattttcatagagagcctggctgacacgtaagtaggggttgactaaaaagtccccctaagaatgtttatcgaattgttgcggatggcagagttttttctttttccaatagtgtagaactttaaaagactcctgtctctaccctttttttcgtattttcctcccttgctacgatttccccttcttcctgccttcttccttttcagtctttcaatccccttttcctccgtccttttttcctttttctttggattcccgttctggtttcctttgcgcatcttcttcacctttcctgtatttcctcttcatttccctggtgcatacgcccgtgtcctcgcccttctaacgcgcgtgtgaatataataaggtgtacccctttccgcctttcctcctgtatccgagaaaaacatgttctacaacatccttataattcaacactttagcttctatcctcaaaaataattcaaaaaaagagtgatttaagtttggagtatatttgaaaagggcgtacttttgcacccgctttccaagagaagaaagccttgttaaattgacttagtgtaaaagcgcagtactgcttgaccataagaacaaaaaaaacttccgataaagtttggaagataaagctaaaagttcttatctttgcagtccgattcgcaaagaaaaggcgttttgtttttcttctttaccttctttccctttcgctaagagagtctgagaaacgatagaaaaagaaaagcgaaaaaaacttccgaaaacatttggtagttaaaataaaacctcttacctttgcacccgcttttaaaacgaaagcagcaagttctttgaaatattgataaacaatacaagtagtacaagaaaaaaatagaaccgtcaatacttgtcttatatatattaatatgtgtgagacgtaaggtattaatgaagtcaataaattgtacggcatcctgaacagagcaaaaatcagctttatgctgactaataatacttttacaatgaagagtttgatcctggctcaggatgaacgctagctacaggcttaacacatgcaagtcgaggggcagcatttcagtttgcttgcaaactggagatggcgaccggcgcacgggtgagtaacacgtatccaacctgccgataactcggggatagcctttcgaaagaaagattaatacccgatggtataattagaccgcatggtcttgttattaaagaatttcggttatcgatggggatgcgttccattaggcagttggtgaggtaacggctcaccaaaccttcgatggataggggttctgagaggaaggtcccccacattggaactgagacacggtccaaactcctacgggaggcagcagtgaggaatattggtcaatgggcgcaggcctgaaccagccaagtagcgtgaaggatgactgccctatgggttgtaaacttcttttatatgggaataaagttttccacgtgtggaattttgtatgtaccatatgaataaggatcggctaactccgtgccagcagccgcggtaatacggaggatccgagcgttatccggatttattgggtttaaagggagcgtaggtggacagttaagtcagttgtgaaagtttgcggctcaaccgtaaaattgcagttgatactggctgtcttgagtacagtagaggtgggcggaattcgtggtgtagcggtgaaatgcttagatatcacgaagaactccgattgcgaaggcagctcactggactgcaactgacactgatgctcgaaagtgtgggtatcaaacaggattagataccctggtagtccacacagtaaacgatgaatactcgctgtttgcgatatacagtaagcggccaagcgaaagcattaagtattccacctggggagtacgccggcaacggtgaaactcaaaggaattgacgggggcccgcacaagcggaggaacatgtggtttaattcgatgatacgcgaggaaccttacccgggcttaaattgcatttgaatatattggaaacagtatagccgtaaggcaaatgtgaaggtgctgcatggttgtcgtcagctcgtgccgtgaggtgtcggcttaagtgccataacgagcgcaacccttatctttagttactaacaggtcatgctgaggactctagagagactgccgtcgtaagatgtgaggaaggtggggatgacgtcaaatcagcacggcccttacgtccggggctacacacgtgttacaatggggggtacagaaggcagctacctggtgacaggatgctaatcccaaaagcctctctcagttcggatcgaagtctgcaacccgacttcgtgaagctggattcgctagtaatcgcgcatcagccatggcgcggtgaatacgttcccgggccttgtacacaccgcccgtcaagccatgaaagccgggggtacctgaagtacgtaaccgcaaggagcgtcctagggtaaaactggtaattggggctaagtcgtaacaaggtagccgtaccggaaggtgcggctggaacacctcctttctggagcgatgtcgtaacaacgatttcataggttctattattgtactactggtacttgtttatttataacatatagatcaaccatctatagaagtatagatagagataaacaagagaaataaagaagccgagtctaacatcaggtagacaaggttgaattatcgagcaagagagagcagaagcgatgcttgcatcgattatgccgaaagcagccgataatgcgtagaacatagtcctatagctcagttggttagagcgctacactgataatgtagaggtcggcagttcaactctgcctgggactactccgaacaaaaattgtcgttgccaatacattattgcgatgttcaattactcttgggggattagctcagctggctagagcatctgccttgcacgcagagggtcaacggttcgaatccgttattctccaccatctctgaaaacagagaaacgatctttgacatgatgtacaaaaagtaaaatttagtaaagagctaaaagtatatatcgaaccgtacgttttaagtaccgcgatattgagtacccgggtttaatacctgatacttgatacctgatacttaaaggtaagtttgaaagaaagtaagcaagggcgcatggcggatgccttggctctcggaggcgatgaaggacgtgataagctgcgataagctctgggtaggtgcaaataacctttgatccagagatttccgaatgggacaacccggcattctgaaggaatgtcatccatctttgatggaagctaacgcagggaactgaaacatcttagtacctgtaggaaaagaaaataataatgattcccctagtagtggcgagcgaacggggaatagcccaaaccacccatgttacggcatgtgtggggttgtaggaccacgatgtcgcaagacatttgacgagtagaatcctctggaaagtggaaccatagacggtgatagtccggtatacgaagtcaaattaagcgtagtggtatcctgagtagcgcgggacacgagaaatcttgcgtgaatctgccgggaccatccggtaaggctaaatactcccgagagaccgatagcgaaccagtactgtgaaggaaaggtgaaaagcacttcgaatagaagagtgaaatagtccctgaaaccgtgcgcctacaagcggtcggagctgcgtaagcagtgacggcgtgccttttgcataatgaacctacgagttactttttccggcaaggttaagcatcttgagatgtgcagccgaagcgaaagcgagtctgaacagggcgtcgagtcggaaggagtagacgcgaaaccaagtgatctacccttggtcaggttgaaggttaggtaacactaactggaggaccgaaccgataagcgttgaaaagcttccggatgaactgagggtgggggtgaaaggctaatcaaacttggagatagctcgtactccccgaaatgcatttaggtgcagccttgtgagttactaatgtgaggtagagcgactgataagatgcgagggcttcaccgcctatcaagtcttgataaactccgaatgcgcattagttctatcacaggagtgagggcatgggtgctaaggtccatgtcctaaaggagaagaatccagaccatcagctaaggtccccaaataaacactaagttgaactaacgaagtcagattgctaagacagctaggatgttggcttggaagcagccattcatttaaagagtgcgtaacagctcactagtcgaggagtttggcgtggataataatcgggcattaagtgttttaccgaagctatgggatcagtaatgatcggtaggggagcattccactctgcgtcgaaggtgaagcgtgagctttgctggagcgtgtggaaaagcaaatgtaggtataagtaacgataaagggggtgagaaaccccctcgccgaaagactaaggtttcctgatcaacgctaatcggatcagggttagtcgggtcctaaggctcagccgaacggtgaggccgatggcagaacaggttaatattcctgtactaccttaaggagtgacgtggagacggaggcgtgacagcgccgcggactgacggaatagtccgttgaagggtgtagatgttgattatcccaggcaaatccgggataagagtcgaacctgatagtatggagcgttcttcggaacaatccaatagtgcgtgtaatcatactcccaagaaaatccgctaaacttaatccttgaggtacccgtaccgcaaacggacacacgtagtcgggttgaatatactaaggcgcttgagtgattcacggttaaggaactaggcaaattgaccctgtaacttcgggataaagggtcccaacgagagttgggcgcagagaataggtccaggcaactgtttaacaaaaacacagggctgtgccaaattgaaagattacgtatacagcctgacacctgcccggtgctggaaggttaagaggagatgtcatcgcaagagaagcattgaattgaagccccagtaaacggcggccgtaactataacggtcctaaggtagcgaaattccttgtcgggtaagttccgacctgcacgaatggtgtaatgatctggacactgtctcaaccgtgagctcagtgaaattgtagtatcggtgaagatgccgattacccgcgatgggacgaaaagaccccgtgaacctttactatagcttaacattgaatttgggtaattgatgtgtaggataggccggagactttgaagcaggtacgccagtatttgtggagtcgctgttgaaatacggccctttgattatttgagttctaactcgtggtacgaggacactgtttggtgggtagtttgactggggtggtcgcctccaaaatagtaacggaggcttctaaaggtgccctcaggacgattggtaaccgtccgcagagtgtaatggcataagggcgcttgactgggagacttacaagtcgatcaggtaggaaactagagcatagtgatccggtgtttccgtatggaagggacatcgctcaaaggataaaaggtactccggggataacaggctgatccctcccaagagctcatatcgacggaggggtttggcacctcgatgtcggctcgtcacatcctggggctggagaaggtcccaagggttgggctgttcgcccattaaagtggcacgcgagctgggttcagaacgtcgtgagacagttcggtctctatctatcgtgggcgtatgaaatttgcgtggctctgacactagtacgagaggaccgtgttggactgaccgctggtttaccagttgtgccgccaggtgcattgctgggtatctaagtcgggattggataagtgctgaaagcatctaagtacgaagccagccacaagattagatttcttagggtcgttaaagacgatgacgttgataggatgcaggtgtaaaggtggtaacatcaaagccgagcattactaattgcccgttcactttctttcggacggtgcggatcgcgatatatacgtttagcttttttaattgacaattgacaaatgacaattgacaattagattaacagatacttgaattttactttttatcatgtcataacttatcatgacagctgcgataattgtcatttgtcaattgtccattgtcaattgaagaaattcaggtggttatagcacgagggttccacctcttcccattccgaacagagaagttaagcctcgtcacgccgatggtactgcgtaacagtgggagagtaggtagccgccatttttagagaagcccttccggtagaaataccagaagggctttattgttttggatactttcggatttaagactggagaggatttattgattatacatatttctctcaattattaaacttggcggacttctttaaaacgtatgtacgcctaactacttttaacacataaaatcacaaactgcgagaacaaaacactttgtacgttgtttcaataatagagttaaacttttatgcttaaatgatgtgaataacgacaaacggatatatttaattgctacatttgtcgccgaaatacgagaattcgatataaacaactaaaataaatatcatgaaaggttctgtgagattcatattagcgattgttctgctgatgctatcatatagcataggtggaaatgctatgaatatcacttcatgtatttctcagagcgaatgctcttgtcagttgtctgaatcaacttccgatacgaattctaattcttcatttaagactcgttcgctggggtatgacagatcatcccagtctttgtctatttctgacgtagaattaggctttaaatcagtaacagaaacatcttctaataattatcgtctgcgtagaatcattgaatccaatgatttctttaaagacgttatgtataagttcttcttgttaagagaaaactcacttgtattagatcaaagtaaatcctattattcggataaggatccacattactccattatctgtagcgactactacgtgttcgctctaagacgtatccttatttaattacttatcccatcttatttactttttcgtaccctgtatgaagctgtgtgactttcattcttgaaaagtcacagggtctatagcgcagtgtatctaatcatttgaaaattttctaaataactaaaattaatatcttaacaaaaaaacttattatggaaactactaaaaagtctcagattgtaggtataaagaatgccggtatcgtaatcatctgctgtttcattgtagcagtgtgtatttttcagttcctgttgggaaatccgtctaactttatgaacaatgaccctaacaaccatccattgaacatgttgggtaccatttacaaaggtggtgtgattgtgcctgttattcagacactgttgttaactgtactcgctttgagtattgaacgcttttttgctcttcgttctgctttcggtaaaggctcgttggctaaatttgtagctaacatcaaagaagctctggctgccggtgaccttaagaaagcacaagagatttgtgacaaacaacgcggttctgttgccaatgtagttactgctactttgcgcaagtatgaagaaatggaaaagaacactgctttgcctaaagaacaaaagctgctggctatccagaaagaactggaagaagcaactgctctggaaatgcctatgatgcagcagaatcttccgattatcgctacaattactactttaggtacattgatgggattgctcggtactgtaatcggtatgatccgttcatttgccgcattgtccgccggtggtggtgccgactctatggctttgtcacaaggtatctctgaagccttgatcaatacggctttcggtatcttgacaggtgcgctggctgttatttcttacaactacttcactaacaaaattgacaaattgacttacggactcgacgaagtcggattctctatcgtgcagacttttgcagctactcattaatttggcgaaccctttaaaatctattaatcatgggtagagcgaaaattaaaaagaaagatacgttcatagatatgaccgctatgagtgacgtaactgtattgcttctgactttctttatgttgacatcaacatttgtgaagaaggagccggtgcaggttaccactccagcctccgtatcggaaatcaagattccggagacagatgtactccagattctggttgaccaggaaggaaaaatatttatgagtctcgacaagcagcaggatatgcaggctgtcttggagagtatgggtgaagagtatggcatcaagttcactccggaacaggcaaagaggttcacagtggcttctacgtttggagtgcctatcagaagtatgcagaaattccttgacctcccggaagatcaacgggacaaaattctgaagaatgaaggaattccttgtgatagtaccgataatcagttcaagtcgtgggtgcgtaatgcacgtgccgccaatgctgatctgcgaattgctattaaagcggacgcttcaactccatactcagtgataaagaacgtaatgaactcacttcaggatttgcgggaaaatcggtataatctgattacttctctcaaagcagaatctgaaaattaaaagggaggaaagacaatgagtgctgaagtacaagagagcagcggaaaaagaggaaaaggcaagcagaagaaaatgactgtccgggtagactttaccccgatggtggatatgaacatgttgctgattactttctttatgctttgtaccacgctgagcaagcctcagacgatggaaataagcatgccgagcaatgacaaggatataactgaacaacaaaagagtatggtgaaagcctctcaggcaattacattattgctgggagccgataacaagctctattactatgagggagagcctaactacaaggattacacctcattgaaagagactagttacggggcaagcgggttacgtgccgtacttcttcagaaaaatgctgcagctgtcaatcaggtaagagctttgaaacaacagaagctcgatctgaagataacagatgacgaatacaaaaagaaggtttccgaaataaaaagcggaaaaaatacgccgaccgtcattatcaaggcgacggatgatgcttcttatatgaatctgattgatgcattggacgagatgcagatatgtaatataggtaaatatgtgataacggatattgccgaagctgatgagttcctgattaagaattatgatgctaagggagaactgtcacagaacttggccgataaatgatgtaacacctaaaaaaagaaagtaaaatggcaaaattagatttagcttcttcggaatggtgtcagctgatttttgaaggcaagaatcaagcgtacggcgcatatagaatgcgtgccaattcacccagacggcatactattgcaatgctgattgtggtggcgatagcaatcgttggatttactatccctacgctgcttaagttggcaaccccggagcaaaaggaagtaatgacagaggtaacaactttgtcgaaattggcagaaccggaaatcaaacaggaagagatgaaacgggtagaaccggttgcacctccccctcctgcattgaagagttctattaagtttactgcccctgtcatcaagaaagatgaagaggtgcacgaagacgatgagatcaagagtcaggaagaattgacttctaccaaagtggcaatctccattgccgacgtaaaaggtaatgacgaagccaacggagccgatattgctgacctgaagcaagtggtgacacaggctgcagaaccggaaaaagtatttgatatggtagagcagatgccgaccttccccggtggacagcaggaactgatgtcataccttggaaaaaatatcaagtatccgacaattgcacaggagaatggaacacaaggtcgcgttattatccagtttgtggtagagcgtgacggtactatcaccgatgtgcacgtagctcgtggtgtagacccttacttggataaagaagccgtgcgtgtggtacaaagtatgccgaaatggattcctggtaaacaaaatggtaaggcggtacgtgtgaaattcaccgttccggtaatgtttagattacagtaagatgatgaagagacaattttggctggtaggaatcgttttgttggcggtgttgagtgcttgccgttccaaatcggatggaccgacggatacgtattcgtctggggtgatatctattgcggcggatgaaagttttgagcctattatacaggaagagatagatgtgtttgaaagtctgtatcctttggccggaattgttcctcgctacacgacggaagtcgaggctattaatttacttctgaaagacagtgtccggttggctattgcaacccggacattgactgaggaagaaatgaattcctttcacagccgcaagttctttccccgcgagattaagctggctacagatggtctggcattaatcgtcaaccgggacaatccggattctttgttgaccgtacgggatttcagccgcatcctcactggtgaggcgaaagactggaaggatataaatccgaactcccgcctgaagagtattcaggtggtgttcgataataaaaactccagcactgtacgctatacaatggattctatctgtggtggaaaaccactggctactgacaatgtcagtgccttgaagaccaatcagcaggtgataaagtatgtagcagagaaccccggagcaatgggagtcattggtgtgaactggctgggcaaccgcagcgacaccaccaacctttctttcaccgaggaaatcagagtaatggcagtgagtgcggaggatgtagctactcctgctaacagttataagccttatcaggcttacctgtattatggtaactatccattggcacgacccatttacgcattactgaatgatcctcgcagtgcgctgccttggggattcgcttcttttatgacatccgacaaagggcagcggattatattaaaatctggacttgttccggctactcagccagtgcgtattgtccatgtgaaagacgaataataactaaaattagagactatcatgaaaagagtacaaatgtttttagctggagcgtttatagcagttgggtcgctctatgcgcaatcatctgatgccgaatggcaggcaggagttgcaaaattgaaagaaaccattcagacgaatccggctcaggccaatgaggaagctgaacagttgataaaaggaaagaataaaaagaatgtggaacttctggtggctatcggcgaggtatatctgaaagccggaaaacttccggaagcacaggagtatgctgctcttgccaaaaaagtgaatggcaaatcggctcttgcctccgtactggagggagacatcgcttttgagcagaaaaacgccggtctggcatctcagaaatatgaagaagctatctatttcgatccgagttgcacagaagcatatctgagatatgcggatatttataaatcagccaatgctgctctggccattgaaaaactggaacagctgaaagcccaggaaccgtccaacacagccgtagataagaaacttgccgaaatctattatttgaagaatgattttagtaaagccgccgaagcttattcgcgttttgcgatgggaccgacagcgacagaagaggatttagtgaaatatgcatttgccctcttcctgaaccatgacttcgagaagtcacttgaagtggcgaatatgggattgaaaaagaatgcgcgtcacgcggcgttcaatcgtctggcaatgtataattatacagacctgaagcgctttgatgaagcaataaaagcggcggatgctttttttaccgaatcggacaaggctgattattcatatcttgactatatgtattacgggcatttgctcgaagctctgaagaaatatgatgaagctgtaggacaatatgagaaagccatacaattagatccgacaaagacggacttatacaaaaatatctcttctgcttatgaacagaagaatgattataaaaaagcaatcagtgcttaccagaaatattatacatcccttgataaggaacaccagactccggatttacaattccagtttggcagactttattatggtgcaggtacgcagactgattcgctgacaatcaatgctgaagaacgcaagcaggctttgatggctgctgattctgttttccattccatcgcagaagcagcaccggacagctacctgggtaatttttggagggcacgtgccaattccgcacttgaccctgaaacgactcttggactggcgaagcctttctatgaggaggtagccaccctgctggaaagcaagaatgatcctcattataattcagctttgattgagtgctacagttatcttggatattactacttgttggctattgaaaatccggcactgaaagcggaagcaatggcgaataaagaaaaatctaaggagtattggagcaaaattctggctatagactccactaatgctactgctaaaagggcattggatggcatcaaatagtgaataattttagttgtttgtcgtgacaggaggagtggagagtgatcttagctcctccttttttttagggatattcctaaaataataaaatttaaggcaactaattcattgcgagttagttgccttttttgtatctttaagcattccccccaaaaaacggtttgacggccaaaactggggtaatctaaactaaaaacacatggtaaagatacaaaaaatctcagaaatcgaacctcgtttaggttttactgagttcgatatgctaaaaaaatatcgtcaaagttttgcaacgagtgaattaggtcgcctccatgctctgtttcctttctcggaactggcccgggaaatgcatttgaagtcctctgctttgggtcgtaaaagttatttttctcctgagggtaaaatagccttgatggtccttaagtcctataccaacttttcagattcacaactgattgaacatttaaacgggaatattcattaccagttattttgtggtgttcagattgatccgcttcatccactgcccaatcctaaaatcgtcagtgcaattcgtcaggaactagcggatcgccttgatattgagtccctccaggctattctggctgaccattggaaaccttatcttgagaaccttcatgtctgtatgacggatgccacctgttatgaaagccatctgcgtttccctactgatgtcaaactcttatgggaaggtattgtatggcttcatcgtcatctgtgcaaacattgccggagattgcacatacaacgtccccgtaataagtatcttgatgtaagccgtgcctaccttgcttacagtaaactgcgtaaacgaaggaaatcacagacccgtatgattacacgcaggctacttcagttattggaaaagttactggaccagctggagcagattcattcatcctacaggaataggcttacactatcctctgattaccaaagacgtttctcggtcatacagacggtccttgagcaagggaagaatttatttgcaggcaaaaaagtgtccaaccgtatcgtgagtatcgaccggcattaccttcgccccattatcagaggcaaggaaaccaaatccgttgaattcggagccaaagtcaacaatatacagatagatggaatctcgtttatagaacatatctcctttaaggcttttaacgaaggagtacgtttgaaagactgtattcatctgcaacaacaactgaccaaggttagggttaaggcgcttgcagcggattcaatctatgctaataatgccaaccggaaattttgtactaaatatcatataagtacttcctttaagcgtaagggcagagctgccaaagatgagccacttcggaagatcttacggtcggaactcagccgtgaaagagctacccggctggaaggaagctttggaacgcagaaacaacattactcactggccagaataaaagctagaaacaggaaaacggaaatgctttggattttctttggaatacatacggccaatgcggtatgcatgatagaaaaggtcgaaaagaaaaaaagaacggctgcataatcagactaaaataataagaggaaaacaggagaggtttttaacttcccctaaaaagacatatacataatgtaacgttgggaagaaaaaataagaatatgtaaataatattctatgaaaaagatagaaaacttgagactttacagaaaaaaaataagagaaaagctcacgtaaagtaaaactgttctcttaatttattagaaagagggacatttactgaatatccctttttattgtcacgtttagctgtttttcagtctgttacattcctttggtaagcgtaaagcagtcgatgtccggtgcccagttgtagctgttgcccatacggatatgattgtaaccggctttcagatcaatggggattgttacttgattgtgcttgtcatcctctcccagtgaatcgattttggttacgatgccgttgacatctatctccagttgtcttcctttaccgaatgaataatgaaccgtcatttggtaacgtccgccgtctgcgctgtatacttccgaccattctgcgtaattctccggttgtccgcccaagaaacctactttcatttttccggaagcttcctgatcggcagcatatatgatgcctttcggatttttgccgagatcattgaacattggcaggtatgcccattctgcttcatacaatgtcggttccagacgtgtttcgccttccatacggaggaacatagcgctgtgtgcaggaagcgtttgctcaaagacatcagagaaatttcccaaatcactgcgttttaccaagtcacgtacttttacgttctcgccaaattccagtgccgagaaaggtacggagaagctgcaaacagtgtccgatggattgtaaagagcaacggcacgtacatttccacgtttttgttcgatgtcttttaccagtacatagccttcgttttcatgttgtgctacgtatgcctgcaagcctagcgggtcttggttcagagcgattaattctttgtttgtcagcagttcaagagaagattccggcagactttccagattacatccgatcagcaggggtgagctcatgatacaccataagccgaagtgagcttcttcctctgtcggggtaagtccttttcctcctactttgctgttgtcgcggaaaccgatgaccatcatatccatgtcattgtagtgcccgtctttagcgtaggcagacaggtataggtttttgccgaccacatatctcaacgaaccccaatgtgcattgatgtcaccgctgatacgccatgaagtagccacatcctttgcccatgtaccggggaaagcccagcggcagatgttgacagagacatccttgtttactttgtcgatgctgttccggatggaagtatagcgttcctgttcattcaggcccagtacatctccgccgcagtagtctatcttgataaagtcgaatccccagtcgccgaaatagagttgggcatcctgttgctcatgtccgtaaataccggcacctactcctgcatgatcgttgtcccagatagaaccgcaagtgttgttgcccgcatctgtataaataccggctttcattccaagactatgtatatggtcggcaaccggtttcattccattcgggaaacggtttttgttggtctgcatttttccattgccgtcccgttcgccgaaatagccgtcatcaacgttgatatagcggtatcctgcgtctttcagacctttttttaccatcaggtctgcctgatttttaataatatcttcactgatatctacccggaaagcgttccatgagctccaacccataatagggggattgactgctttttcacttccggactgagaaacctgagtttctgcacaactaacacataacaaggaaactaccgctgtggctaaaaggtggaatctgtttttcatgatgtaataggttgatgaattaatgggattaaatgaaatattggtaacaaagatataaatgaatctattggcgtgcaaataaattaaactgaaaatagggaggaatcgaacgaaaaagaaattgattattgaattatctgatggatgatcagtacgttatacccgccgtcccgatttcgtcccggctatttaaaaagataagggttaactttctgaatctcagtaagctaacccttatcttgtcggaatgaggcgactcgaacgcccgacccctacgtcccgaacgtagtgcgctaccaactgcgctacattccgctctcgaaatgtggtgccaccaggaatcgaaccggggacacaaggattttcagtcctttgctctaccaactgagctatggcacctttctcgtttgcgggtgcaaagataagtatattttttaatactgcaataacttagagggaatttttcgtctacttatgaggaaagaaaaaaaacttttctttggggggagaataaatatgcaaatgtggcatcatttattcagtatattttatacttttacgagccaaaacgatcaggacactacaaacaatagaatatattattatggcattacagtttattacggttatttcgttagctgcattcatttatgtactgattaagtatcagtcggttaagaagaatatgaatttgaaagcatctgtaatgttgcgtgaatctaatgagttgacttctatactacagaatataaacgtttactatctgttgattgacagagactttatcgttcacaataccaattattatacactgaatcatttgactcctgcgcagggagagagaaaaaaagtcggagatttattgcattgtagaaatgcgatagcagccggcgaatgcggaaaacatgaacaatgcaaattgtgctgtatacgtacatccataagcaaggctttttatgaaaagcaggactttaagaaactggatgcctctatgaaacttttaagtgcggatgaaaagacggttatttcctgtgatgtttctgtttcgggcgcttatctgaaaataaacggtgaagaacgtatggtgctgacagtctatgatgtgacggaacttcgaaatatgcagcgtctgctggatgtagaaagagaaaatgcgatttctgccgataaacttaagtctgcctttatcgccaatatgagtcacgaagtccgtactccgttaaatgccattgtcggattttcagggctgatggctacggctaccagcgaggaggaaaagaagatgtataccgatataatctctgaaaataatgagcggttattgcgactggtaaatgacatctttgatctttcgcagatagatgccggcgtgttgaactttgtatattcggagtttgatgccaatgatttgctgagggagctgaaagggcttttcggaatgaggctgaacgagaaccctttggtgacattggtctgtgaggcacatctggaaccgattatgatgcattcggagaaacagcgtattattcaggtattgactaatctgctccataatgcgatgaaatttacgaagacaggtgaaatccgttttggctgtcatatggaaggtacggatgaagtctgtttttacgtatctgataccggtatcggcattccggaggaggagcaggagaagatattctcccgttttacgaaacttgaccgggagatgcagggaacaggactcgggctgacgctttcgcagacaatcgttcataatctggggggaagatgcggagtcgaatcggaagtaggcaagggtagtactttctggtttatattgcccttggtcacgaagacagaaataacaactgataagatatgaataatcccaccctgaacattcactggttcaaggtgggattatttatgtaaacgatatgtttagcttttaagatttgggtgcacccgcatccttatttccggaatcaggcgatccgttgcttgcagtggtacttccaccggaagaagccggattgcttgccggagcagaaccggaggtggtagagcctgcacttgccggaccggaagttggggtacttgctggcttggcagtagcggaactggccggacttgcagacgatgttgaagcagaaaccggacgagcggcatttgcactgttggcagtaacaccggcagtaacagtctgaggctgaacttcccagtggaacggttcgaagtcagtatccggatctttccaggacggtttcttggcagcgtagatgatgaacggagcaacgactacaatgattgcaccgataatcaatacagagaaccaaacggtgttgctaccggtagaaatctggctgggcggaatgaagctcaaaatgaaagcgagcagtgaaccacagaaaccaagaccaccaatgaaccacatcaaaccgttaccggacttaccgatacggaacggacgatccaatttcttcatcttataacgcagtgcgatagctccggagaacattaacagatacataatcagataaagaatcactgtcaactgcgacaaaatctgatagaaactctgtacggaaggcataacgacgaacaacaaactcaatacagtcacagcgataccctgtacgaacaagatattcttctgtacacccagtttgtttgttttctggaagaacggaggcatataaccagctttacctacggcaaagataccttttgacggacctgcaacccatgtcaacacaccggccaaaactccaaacgcaagagcgatggcgataatcggtgataaccaggaagcgtgaatgtacttgaagtagttatcaaaaccgacgagcaaactctgagttaagttaatatccttggcagggatgataacgcccaatgcgaatgtgcccaaaacgaagataagaacagtgataagcgcaccgataaatacggctttcggataattcttggatgggttttctacgtctttcacgtggataccgcccatttccataccggcataaaacaagaagatactggcagcaagaacgacattgtcgaaattagtaaaatcaggaatgaagctgctgtggaaatccatattggattgtccgccggttgccagataaatgattcccaggataatcagcagggcagccggaataattgtaccgaccataccaccaattttggctaccttaccaacccagctcatacctttcagtgaaatgaaagtagccagccagtagatgataagtactacggcgagtgtataatacttgttgtttgccagcgacatatcatgtacgtcgttcattccgatgaaggcaatggatacggcaccgaatgtcaatacggtaggataccagatcgtactttcgatccattgtacccagatggcgaggaatcccagttttttgccgtaggcttcgcctacccaccggaacacaccaccttgcttatcctgaaacatagctgccagttcggctgctacgagcgatgtcgggataaggaagacaatcgctgcgaaaagatagtagaaggccgaactcattccgtatacggcctcggctggtagcccacgcaatgatactactgccgtaacgttcatgatagccagggtaaacacgcccagcttcactgcatttttaatatttgccataagttaaggttttaagtgaaaaatattttaaagtcagtgttataacaacattttgcgtgagatgtttccgcaatctctttcaaagttcgttaattaacatcgccggatggctcaattgtaaacctccggacgcctgttccgaaacaatcgctttctcagattgtttctaagcattataagttacataagaatcattttattataaattaagtagttatgaaatcagcgctttccgattttattctggggaaaaaggggatttatggcattctccacattattatattgttaatgtccctttttctggttattagtatttcgattgatacgtttaaggggattcctttttatacacagtcctcgtacatgaagatccagttgtggatttgcatctggttcctgttcgattttgtactggagttttttctggcaaagcataagtggcgttatatacggacgcactttatctttttgctggtggcgatcccttatcagaacatcattgcgtattacgggtggaccttttctcccgaagtcacttacctgctccgctttattcctttgctgagagggggatacgcattggccatcgtagtgggctggctcacctacaaccgggcttccagcctgttcgtctcctatctgacgatgttgctggcaacggtctatttcgccagccttgccttctttgtccttgaacataaagtgaatccgctggtcacggattatggagacgctttgtggtgggcatttatggatgtgactaccgtcggatcgaatataatcgcgatgacgactaccggaagggtactctccgtactgctggcagctttgggaatgatgatgttcccaatctttacagtctatattacgaatctgattcagcagtctaatcaaaagaaaaagcagtattatgcggaagaggaagaaaagaaggagcctgcacaggggacataatccctttttcatatcgatcattcattattcatgggtttagtttatttccatatcgacttagctcattagaatgcgttataaactaatttcagatatgcgcatatttactcctcgtttttaataaatctatcgcctgaagtatataaaactattcgtctgacaactgttattctttcgtctaacaactgtcagacgaaagtttaacagtagtcagacgaaagttcaactatagtcagacgaataaatttaagtgcatcgaggattagttctttgcatacacagaattaaacttaagtaaaggagggggaatgattagctcgctaaggaacgagaagcctgcaaaagcatttttataaaaatagaaaaggttactacccggaggatagcaaccttttgtttttctcatagagcggataaactagtcgactacgatcaagtgattgtcactgaatacgttcagtcccagtttattcatgacatattggatagccaattgtgcttttaccgaattgcctgcaccatccaaaggaggagcgaatgcggcaataccgaactgtccgggcaatacgcccattacaccaccgcctacaccggttttggccggaataccggaggtatacatccagtctcccgtgtgctcgtagaagcctacggcagcgatcattgcagtgatcttgggagcgaggctggcatcgaatacttctttctttgtcaccggattcacaccaccgttggcgattgttccggctgccacagaaagctgcaaggccgttactcccaatgagcattggcgggtatacaggtccagcgccatatccggatcatcatagatacggttgtagttcttcagcaaccacgcaatggaacggttgttaaagttcgtatccgattcggatttgtacaattcatcaatcagttggggagcactgccgcataaatcggtcacgttctctacgatggcatcccacttcttggcagagtcgccgataggttttaccatactgcaggctgagatggcgccggcgtttaccaatggagtagacgggtggtcattttccagcaggatagcgatgattgaattgaaaggcaggcccgttgcgtcagctccgatcttgtctaatatttctttggcaccatattggcgcagtgcaaggatggccgtatgtactttggatacggattcgatgccgaagcggtagtcagtatctcccacatggatggtctgcccgttgagcaggcagacactgattccaaagagatctttgttgacattggccagataagggatatagtcggcattcttaccgcctgtattcgttttcacctgatcgtatgcctcctgtaccacttctttcaattgagcgagtgttacttttttgtccatagatcaatttatttttttacggttttatgacgacgaccaccgtgattgaacatcttggcttctaccggaagatttttttcctgagccatgcgggtaggagtcgggaaatcaagtttttccagttcggcaattgcattcttgatatcacccagcaacatatctgccatatcgcggctgaatccctggcgaacaactacacgcattactacataatcttccaatttggaaggcaatgtataagccggaaccatccagccgtgctgagacagtttatcctgcaaatcgtacaatgtccacttggctgtttttgcatattccggtttcagataccagatgaacaatgggttcactacattttcggagtagttgacgaacggagccatcttggcgatttcaccgtggatgtatttggcaatctgcaaagaattatattgtacttccttgtaaccttggaatcccaaacggatgaattgataatattgtcccagaatctgagcggcaggacgagagaagttcaagccgacctgagtaatgttggcacccagatagttgacgctgaatgacatttcttcgggcagatattctttgcctttccagcaaacccagccaagtcccggatataccagaccgaacttatgaccggatacactgatagaaagtacccatttcagacggaaatcccacttcgtatccggatagaggaacggaagaatgaaaccaccactggcggcatctacgtggataggaatgtcataacctgttttggcgttgtaagcatcgagagctttgtccagtgcttcaacgtcatcgttcagtcctgtccatgtaacaccttggataggtacaacacagatagtgttttcatcacacatcttcagcgcttcttcggggtcgagagtggtcttttcaagagtcaaaggcacttcacgcatttcgatctgccacagttgcgcgaacttttcccatacaacctggaaacctgttgagataacgaagttaggtttgtcaaacggtttaccttgagcttgtcttttcttacgccagcgcaaccatgcagctacaccgcccagcatacaagcttcggaagaaccgattgccaacgcaccggttttccatgtatctttttccggagagttccacaagttggcgacgatgttgatacatttaccattcattacggcgatacgaggatattcggtttcatcaatatagttgatgttgattgcctcattcatcagcttggtagcgtaatcgtccatataggtggttacgaaagtagctaagttcaagcgtggctgagtttgggcaaatgtttcatctttaaccatctggtaagcgacttcaggggtggttggtccatcaggaattctttctactggagagggttgtaacattctgtctgaaccgaatacgtcggtttttgcatcaccttttctgaaatttaaatcttccatactaatttgtttttttaaaggtttagggcgatggggattttccccgtcgaatttccctcaacaacagcagatggttttgaaagttttcggcttttacattatttggcgtttattaaggggcggctttggggcaggcgtaaggcggtgggaacggaaataaaaaaggcaagaaggggttgtttccctcttgcctttggctatttgctgacaactggcagcttatagttatctgatacctattgaattgtgttgttaaggtttagcggaagtccttcagttcttcctgcagtttttggcgggtgaagaatatgcggctctttatcgtacctaacggcaggttcagcttttccgcgatttcgcggtacttgaagccggaaacatgcatggcaaacggcactctgtattctttgggtaatgaattgactacacggtgcatctctttcaggtcataggctttttcggtgctttcaaaccctgtgtcctgcggtaaattcaggtggtaaaggttgtccgtccggtcaatgaatgtctggtcacgaactactttgcggtagttgttgataaagatattgcgcatgatggtatacatccatcctttaaaatttgtgtcaggcatatatttatcttcattgtctaatgcttttaatgatgtttcctgcaacaaatcgtttgcttcttcgcggtcggttgtcagcttataagcgaaacggagtaattcgtcctgtactcctactaaatcttttctgaagcttacacttttcatatacgttgctttttaaattgtgaatattcgttgttaaatttcgatgatgcaagtttacgggatttttttaagtacggcaggggtaaaactgacggaatttaacctaaaaactgtctacggatagtttttaggtcataatctgatagtttttgggtgtttttcacccgttttttgaatattcactgttgtctcatttgaactttataaggtaatcattgttttcatcagacctaaacttttaacgaaccggtatatgaaaatacaaactgggaggggaacaatacctcttatcactttaatagctatctggtctatctcggcattgacctctttgccggggctggctgtttcgcctatattgggcgaccttaccaaaatttttccgaaagcgaccgacctggatattcagatgttgacttcgctgccatcgttgttgattatcccttttatccttttgggcggtaaactcaccgaaaaggtcgattttgtccgtatcctgaaaatcggactctggctctttgcagcaagcggtatcttgtatctgatctccaacaaaatgtggcagttgatcgttgtgagtgccctgctgggcatcggctccggactgattattcctctgtccacggggttaatctcaaaatattttgtgggtacttatcgggtgaaacaattcggattgagttctgccattaccaattttacattggtgatagctactgccgtgactggatatctggcggaagtcagctggcatttgccgtttttggtctatctgctcccgttgatttctattctgttggttggtcacttaaaagaaagtcggtctgacgctgccgtcgaaccttcttctcaaagtaccgcgccatccggacaaacggctgccgtagataccggaggaagtaaatatggaatccatatcaagcatctgcttcagatcatgcttttctacggagtgacgacttttattgtgctggcagtcatattcaacctttctttcctgatggagaaacaccatttctccagtggcaattcgggactgatgatctcgcttttctttttagcgattatggctccgggtttctgtctggacaagatagtggatgaactgaaagagcgaaccaaagcatacagccttctgtctatggctgtggggctggcgctgatctggattgccccgatcgaatggctgattattccgggatgtatcctggtcggtttgggatatggcgttattcagcctatgctgtatgataaaacgacgcatacggcactgcctcaaaaggcgacaatggcactggcctttgtgatgatgatgaattatctcgccattttgctctatccttttattatagattttctccaaaatctgtttcacactcagtcgcaggagtttccttttatcttcaatttgttgataactattgctacattcttctgggcttacctgcgacgcgatacctttttgtttaacgatcaactgaaataaaaaaagatgaagaataagaaactggaagccaatctgagtatggctgtatcaaaaatattcagcggtttgaatatgaatgccctgaagtatctgcttcccctatggatgagcccgttgacaggtgcgacgcttcgttgtacctttgctgccgctgcattctgggtgatcggatggttcatgccgccggaaaagtcatccgccaaagacaaatggctgcttttcctgttaggggcattcggactgtacggctttatgtttctttatctggcggggttgagtaaaacgactcctgtatccagttccatatttaccagtctgcagcctatctgggtgtttctgattatgattttcttttataaggagaaggcgacatggaagaagattctcggaatctccatcggactggtcggtgcactggtctgcatcctgacccaacagagcgatgatttggcctccgatgctttcatgggaaatatgctttgtctgatcagttctgtcgtttatgctgtctatctgattttgagtcagcgcatcctttcttctatcggagcgatgactatgttgagatatacattttccggtgcggcggtctccgctattatcgtgacatttattacgggatttgatgcgccggtgttctctatgccgttccattggacccctttcctgatattgatgtttgtactcatatttccgacaacgatcagctatatgttgcttccggtcggtctgaagtatctgaaaacaacagtcgtcgcgatctacggttatctgattctgattgttgcgaccattgcttctctggctctcggacaggaccgttttagctggacgcagacgtgtgccatcatttttatttgtattggcgtttatctggttgaggtagccgaaagcaaagacaagtcgccggaccccttgaagaaatagatagataacgtcgtgctttaccgtatgatatgaaaaaagcgggcgcccttctcagggtgcccgctcgcttatgttgtcatcatgttttatagagaggagttgattgcttgcgcaatggatttaaattcttcatccgataatttcagcttcggattggagaacaacatatccgattccttctgaataggaattaagtggatatgagcatgcggtacttccagaccgataaccgcttcgcctacctttttgcaagggaatgctttttcgatggcacgggctatcttctttgcgaatacgtgcattgctgcgaggtcttcgtcacttaaatcgaagatgtagtctacttcctgtttgggtactaccagcgtatgtccctttaccaatggattgatatcaagaaaagcaaaaaactggtcgttctccgctatcttgtagcaaggaatttcgcctgcgatgattctactgaatattgttgccataacctttgatagataaaagaaggcaagcctcacacggagacctgcctttctgttaaattgatatgtttactacttctaatgcaattttaccctgcggtacggtaatttctgcaacatcacccaccttcttgccaagcagaccttgtgcaatcggggtgtttacggaaatcttgccttccttcaggttagcttcgctttcggaaacgatggtataagtcatcttcatgccattcttgacgttcttcagctccactttgttcagaatctgtacagagtctgtctttagtttggactcgtcgatgatcttggcatctgcaatgaccgttttcaatttgttgatgcgcatttcaagcatcccctgtgcttctttggctgcatcatattctgcattttccgacaagtcgcctttatcccttgcttcggctatagccgcagagattttggggcgttccactgtttccagttcctttaattctgccattaactttttgtaaccttcttctgacatataagccatgatgtttttcctccttttatttaaaatggtcatataaacaaaaaagaattccaacatggcacatgttggaaccctctcttcaattatttctctgcaaagatagacttttaagtgatatctgtcaagtgaaaaatgatgctatgtaacatatttaaatgaaatatgctaaattataacaacttagagtaatgacttgacggatgcttcgaggtctttgatgtcttcgccgcggagcttcagttcgttgttccggttgatcaggaagatggatggaacctggcgaacattatatacagctacgttggtcgagtagacaccgttgccgtcacgtacgcaaacccagggcaggttgcctgctgcggttttccagtagtgctcgtctgcgtcgagagatacctgatagatttccagcccatcctttgcgtatttattatatagttcgcgaagcatcatattgtgaggcgctcctgccggtgactggaatacggagaaatccagcagcactactttccctttcaggtcggtcagtttgcgggtatttcctttcacgtcacgcagggcgatgtcgataataccggtctcgatgatcttgtcctgtggaatttccagagacttgctctgtggctgacgggtatttttcatccctttgattacgatattatatagattttttgaacgtacagcatccggatatgtattgttgaggctggtagcgacagctgcaaaacattttacatcgtccttgttgttcagcggatcgaagatcagatagtcattcagcttttggaacagggcgaagtaagcggctgccgtgttgggagctgcgaatatataattcactttgacgtcctccttatagttcttcagcagtgttgcgaggttctcttcaaacgtatcgtgtcccagtttgttggcacgcagcgcattcagttgctcgtccacattcttttgaagattgatttgtttcagcgtcagttcctttatcttactgctgttttcagatccttctaccgtgtaggcggtagagaaatcaacatatggagcgttgatctgtagcgtttcgatagaatccacagaaaagttgatgactttgttgtctacccgcaagcgataaaactcgggtgattcggggcggggttgtttaaacttgaatgtaccttctcctttcaatttaaccgaatcaagcggaacaataccttccagaccggaagcttcgagataaagcattttcccgtcggcccctgatatgtctccgttcacttcaaactcaggaccggaactacaagctgtaatggtaagtgcggcaagcgctacaaaagttatctttttcatatctcgtgtgttttttaagagttgcaaatatacgtcttttcgagattactcaaagctttttgcctgcttcttcacctctattttgcaaaaaaaacatatagcgtctaactttttagctcatttccacctgattacaacgagaaatgtatatctttgcaggaattttgaaagaaaagtatagataaaacaatttttatgattaacccaattgttaagacgatcgagttacctgatggaagaaccatcacactcgagacgggaaagttggcaaaacaggcagacggttctgtaatgctacgcatgggaaacaccatgttattagctactgtttgtgccgctaaagatgcagttcccggaacagatttcatgcctttgcaggtagagtataaagaaaaatttgcggcattcggccgttttcctggtggcttcaccaagagagaaggtagagcttccgattatgagattttgacttgtcgtctcgttgaccgcgctctccgcccactattccctgataattatcacgcagaagtatatgtaaatatcatccttttctctgctgacggtgtagatatgccggatgcactggccggattggcagcttctgcagcactcgctgtttcagatattcctttcaacggaccgatctcggaagtacgtgtagcacgtatcgacggtcagtttgtaatcaatcctacttttgaccaactggaaaaagctgatatggacctgatggttgccgctacttatgataacatcatgatggtagaaggcgaaatgcacgaagtatctgaagctgaactgctggaagcaatgaaggtagctcacgaagctatcaaagtgcattgcaaggctcagatggagttgactgaagaagtaggcaagacagtgaaacgtgaatataaccatgaagtaaacgatgaagaattgcgtaaggcagttcgtgaggcttgttatgacaaggcttatgcagtagctgcttccggaaataacaacaagcacgaacgtttcgatgcttttgatgctatccgcgaagagttcaaggctcagttctctgaagaagaacttgaagaaaaagctccgctgatcgaccgttactatcatgatgtagaaaaagaagcgatgcgtcgttcaattcttgacgaaggcaagcgcctggatggtcgtaagactactgaaatccgcccgatctggtgtgaggttggtcctctgcccggtcctcacggatctgctattttcactcgtggtgaaactcagtctctgacttctgtcactttgggtacgaagctcgacgaaaagattatcgacaatgtattggaacacggaaaagaacgtttcctgctgcactataacttccctcctttctctacaggcgaagcaaaagctcaacgtggtgtaggccgtcgtgaaatcggtcacggtcacttggcttggcgtgccttgaaaggacagattcctgctgactatccgtacgtagtacgtgttgtttcggaaatcctcgaatctaacggttcttcttctatggctaccgtatgtgccggaacattggcattgatggatgccggtgtgaagatcaagaagccggtatcgggtattgctatgggactgatcaagaatccgggcgaagaaaaatatgctgtattgtctgacatcctcggtgacgaagaccacctcggagatatggacttcaaggtaaccggaacaagagacggtatcactgctactcagatggatatcaaggtagacggtctgtcttacgaaattctggaacgtgctttgaaccaggctaaagaaggacgtatgcacatccttgacaagatcaccgagacaatcgctgaaccgcgtgctgacctgaaagaccatgctcctcgcattgaaacaatgactattcctaaagaatttatcggagctgtaatcggccctggtggaaaaatcattcaaggtatgcaggaagagaccggtgctgttatcactatcgaagaaacagacggtatgggacgcatcgaagtttccggaaccaacaagaaatgtattgatgatgcaatgcgcatgatcaaagcaatcgttgctgttcctgaagtaggcgaagtatataaaggtaaagttcgctctatcatgccttacggtgcattcattgaattcctgccgggtaaagacggtttgctgcacatttccgagatcgactggaaacgtttggaaacagtggaagaagccggaatcaaggaaggtgatgagatcgaagtgaaactgatcgacatcgatccgaagacaggaaaattcaaactttcaagaaaagtattgatgccaagaccggaaaagaagtaaaaaagcagatagcttttagataatgtgatagcccgattactcagtattcgggctattttttttgtctattattttgcttttctgcgaaaatatgtgttcttttgtacgaactaatgaaaatagcctgtaaatcttatgcgtgatgcaccaaacgaacaacatatcttctattcaacttttttctgaattctttcatgagaatcaagagaagtttttgtcgtttgcctattcttatataagagacaggcaggaggcggaagatatattgatggagtcaatgattactctgtgggaaaacagggataagtgggaagaagattccaatctgcacggtctgctgctgactatcatcaaaaacaaagcgctcaactatctggcacatctgcaggtgcgtcttcgggccgaagaagagataaatagccatagccagcgggaactggacctgagaatctctacactggaagcctgcgaaccggatgcgatctttgattcggaaatacagcatatcgtacagaaagcattgaaacgtatgccgaaccaaagccggcagatttttatattgagccgttatcaaaatactccgaacaaaaagatagcggaacaactcggcatttccgtcaaaagtgtggagttccacatcaccaaagcattgaaaattctgcgtaccgaactgaaagattacctggtttctattcttttttaaaaataatcgcatttttcgttagggttgttcagggctgacctgttttatatatagaagggagagaaaaagcctttctatgaatataaataggaaaagacaatatctatgaaccaggatttactacataaatattttaagggcgagacttctgtcgacgaagaaaaacgcattcttaactgggtggacgaatcggaggaaaaccggaagacattgcagaaagaacgtatgctgtttgacatcgccctttttactgactctaagagaaaaacgagagagaaagcaggcgcgggcgctcgcatcatccccatgttaaggtggagtgcccgtatcgctgctgctgtaatcgtagctgtcagttgcggacttttgattaatgaataccggtatgataaattggcacagttgcagacggttactgttcctgccggtcagcgggcacagattacgctggcggacggaactaaaatttggctgaactctgaatcgacgctgagatatagctctgacttcgggcgccgcgacagagatgtggaactggacggagaggcatactttgaagtagcaaagaataaggagatacctttctacgtaaatacggagaccaatcaggtcagagtggtaggcactcatttcaacgtctgcgcatataaaggaagcaatgaatttgagactaccttggtagagggcatcgttgatatctacgcttatgacaatgaacgtccgctgacccgcctgactaagaatgaattcttcggttcctatcagggtaaatataaaaaagccgttctgccttcttatgattatctgcgctggcgggaaggactgtattgcttcgacgattctccattcagttgtatcctcaccaagctggagaaatattataatgtgaagatcaccatagagaatccgaaagtgctgaattatcgctgtacgggcaagttcaaggaacaggacggtatcgagcacattctcaaggttatccagaaagatcacccgtttacttattcgatcagtgaggaaggagacagtatccggatagaataaagccggaataaaaattaagatgaataactgagctcaataatatacaccttaaattagtactaaccctttaaaaacataatgattatgaataacagtcaataagtataccccttaccgaaaaagaatcggaaagtacccccatacttcccgattcgaaacagtcaaaaatcgaccttaatcaatttattaacttaacacgttgcaaagatatgagaaaaatttctttgaaagggcttttttgcccaaaaagtttagaatctaagcaaataatactgactatgaagatcacattattccttcttctgttcgtaacattccaggcttattgtgagaatggatactctcagagtgctaaaataagcattccgcgttcgactctgaaagtaagcgaattgcttacccagattgagtctcagaccgactatttgtttgtctacaataaaaaaagtgtcgataccaagcgggtagttaatgtagatgctaccaatcagccggtatccgaaatactcgataaggcttttgaaggaacaggtatccattatgtggtggaaggcaataatattgtgctgaccaagaacgtaacggagcatgcatccacacagcaacagaaacaaattacggtgaaaggtgtcgtgaccgacatgagaggcgagcctatcattggcgccagtgtcgtggaaaaaagtacgacgaatggtacaatcaccgatttggatggcaactttactttgaaagtgccaagcgacgctatcattaatatcacctatgtaggttaccaaccgcagagcctctctgtcagcggacaaacaactttcaagatcaagatggaagaagaatcgatggcattggagcaggtagtggtaactgctatgggtatcaagaaaaaagaggcttcgttgacgtactctactcaacaagtgggtggtgacgaactcacccgtgccaaagacccaaatatgattaatgcattggcaggtaaaagcgctggtgtacagattaccaaaagctctgccggattgggtggctccgccaaagtttctattcgtggtgcccgttctgcatttgccagtggaaataatcagcctttgtatgtaattgatggtgtcccgatgcttaataatactaccgagtctactgctactgttatgggtggagagaatgatggtgtcaaccgtgatgctggtgatggcgtttctaacttaaatccggaggatattgaaagtatgagtattttgaagggagcttctgcagcagctctttatggttctcaggctgctaacggtgtgattttgattaccacaaagaagggtaaggcaggcatgcagaaaataactttctcttcaaatctgacagtagaccatgcaattagtttgccggaattccagaactcatatggtcgtctggaaaatggtacgagcagttggggcgaaaaaggaaatctcatagactataagaacgtagataatttcttcagtaatggtgtgactgctattaatactatttcttttatggccggtaatgaaaaaactcaggcttatttctcttatgccaatacaacggctaaaggtattattgactcgaacaagcttcagaagcataatctcacttttcgtgaaacggctagcttctttaatgaccgtttgaagctggatggtaatgctacactgatgacgcagaccataaagaacagtcctgctacaggtggatactaccttaattcattggtaaatatctatggtttcccacgtggaatggatatggcaccatatagagatgaatttgaaaaatatgatccgtcacgtaatatgaatcttcagaattggtatgtgactaatgaagacggctctatcagtgaatgggaccagaatccttattggataaagaaccgtgtgacaaacaagaataaacgttatcgtgcaatggcgtctttgactgccaacgtgaaagttacagattggttcagcttgcaagcacgtggtaatgttgatttcattagtgacaagtttgaaaataagatgtatgccacaacttctccgaacattgccggaacgtatgacggactgatgaacgggcgttatgtatggtctgatagtcagaatttccagacctatggtgatgcaatggctatgttcaataagacatttgataaaatttccattaatggagccataggaacaagtattaacactactaccgttaactcattgatgattgattctaaacttgcttctttgtatcatccgaatgtatttacagtacccaatgttgtaatgagttctaaagctgctgtatctcagactattgattcaaaacgtactatacagtctatatttggcacagctcaggtcggctgggatgaaatgctttatctcgacttaactgctcgtaatgactggtcgtctacacttgctaatacaaatagcatgcattccggtttcttctatccttcggtgggtgtgacatggattttgtctaaaacattaaagatgccagagtggatctctttcagcaaagttcgtggttcatgggcgcaggtaggtaacgatttaccgattggtataactagtcttgctgatattattcagtcaggaggaactgttcaagtgaatgatagggaacatcgtggtgacttgaaaccggagattagcagctcttttgaagttggtacggaatggaggctttttaatagtcgtttaggtattgactttacttggtaccagacagatactagaaatcaattgctgatgatgccgaatcctgccggtgcgctttttgcctatcgttatgttaatgcgggaaagattcgtaacaaaggttttgaacttaccgtagatggtactccgctgatgaatgacaatttccgttggaaaacatctgttaatgtatctgccaatcgcaataaggttatttctctacatccagattatacacagttctcttatgggcaggaaggtttctctatggcttatcagatgcgtattaaagaaggaggaaaattaggtgatatttatggaaatgcctttgaacgcaatgatgatggttctatcaaggtaaatgcagatggctctccggtaagcagaaccggtaataaagacttgttgggtaacagtaatccggattgtttgttgggatggagtaatacatttacttataaaggttttactttatatttcttgatagacgcacgtcttggtggtgatgtaatgtcactgacagaggcggatctggatgcccgtggtgttaccaaggcaacagctgacgcacgggatcgtggttatatagaatataacggtcagaagtttgagaatgtgaaaggattctatggtactgtcggaggacgtaatggcatttctgaatattatatgtatgatgcaacgaatgtacgtttgcgtgaattatcattaaactattctcttcctcaaaggtggttgaccaagacaaaagcatttcaggccattgatatttcatttgtagcccgtaatttgttctttatctataaggatgctccgtttgatccggatgctactatgtcagtgggaaataataatcaaggtgttgatgtctttgggatgccgactacccggaatattggattcaatgttaaatttacattctaactttaaaatcattgcacattatgaaaagatataaatatatattgacgctgcttacaggcggattatttactttctcaggttgtaccggaaatttcgaatctgataacgaattaaaaggtgcatataatgaagaagcacagtcttatgattaccagaagtacacaatgcctcttgaagttgtccaatcggggatttatttccaatataactggggggatggcctgaactggccttggcagttgacacaatcactgcaacatgatatgttctctgggtattttcatgatccgactgcgaagtttaatgataaaaactcggtttatagtataaatacaggatggtccaatgccgcttggaattacacttacagatatatttttccagctatatacaaagctgagttaaatacaaaagatgtggaagacgcgattcggtattatgggattggcaaaatcttaaaagttgaattgatgcatcgtatcacagattcttatgggcctattgtatatagtaagtttggcaatggcgaagccaatgatgtcgatacacagcaagaagcatatatggctttctttaaagatttagatgcagggatagaagcattggacaaatatttgaaagacggtggagataataatgcttttaaatctcatgatatgatgaacgcatcaggtattgacggatggataaagtttgcaaactcattacgccttcgtcttgccatccgtatatctaatgttgataaaacaacagcagcggcacaggtaaagaaagcattggaaaattcatatggtgtattggagaagcctcaggaagtgattcaggtttcgggtcgtggttatactaatcctctgtatggagttgccggatggggtgaagtttatatgggtgctagcttggcttctgtaatgaatggttatgaagatccacgccgtgaaaaatggttcaataaagcaactttgactggacatactgataagtggatcggtataccgcaaggggtatttatgcaagaaggagatcccaattattacaaagggtattcgtcattcaatacaattacaggtgagacaacaccggctattcttatgacatctgcggaaatttggctcttgagagcagaagcagctttgcgcggatttacagcggaaagcgttcaggattgttataagaaaggagtacagacttcatttacgcagtggggggtaggggacgctaactcttatctggatagtgacaaaatgccgacagattataaagaatatattcccgaaagtggtggtaaagatatgaaagctcttatcactattactccgaaatgggatgaaagcgcgagccctgaagtgaaattggagcgtattattacccagaaatggctggcatgtttcccggaaagctatgaagcttggtcggagcagcgtcgtactggatatccaagactatttaaggtacaaacaaataatagcggtggagctattgatacagaaataatgattcggcgtttgcctttttctgttgacgatgctgaaaagtctcctgaacagtatggatttctgaaatctgctcttggcggagcagataatggtggtactcgcctttggtgggatactagtaagaataacttttaaaaaattaagggaattgtagtaatgtctcaattccctttaaaaaaagaatatcatgaaaaaaatattttttattatatgtatatcctgcgtgatatattcatgtactactgagaatctagttgaagaattgcaaaataagacgcaaacaaatgagcagacccgaggaatagtatcagatagttcaccttctgtcactaaccctaccttgttaacagattgggaaaatttgcagacggtagtattaaatcggtcaacacaaacggatcataagacagcaactttaccttgggtgtcaggagcaatttcaaccatccctgcagaaatagctcaagatgtaaagaaagagaatggttggataatgcttatgcatacatttaaaaattatggggaagatgaaacaagtaattatatgattttctataatcgtctgacgggctttcttaaagtcttttattatctagacaatactccaactcctaataatggttttttgtgggaagtacgttcaaatggtaatactccgacttcatttttaagtttaaatgatttttttgcgaaaccagaaaattctaccaataaaaactcggcagtaatattaagtaatatggcacaatcaccgtcctcaggggtttctttagggtggaatggatttcaaatggaaataccttattcaactacatatcatgatttatctattgatattcaaggatataataatcatgtgacaacatatgattttagtggaaaatcatcttttacaacagagggaacaataataaaaacagcagagagtcctaatggactaaccaattctgtagcttctttagcaggaaacagtgctaaacataaagtggacaatttggctaaatctaaaaaagttaaacttggaagtaaaataacagatgctattttaaagattccttctggtggatatgttggagctatttcagctggtttgaagtttttaggaggtatttttggatcaaaaactacaacggaaacggaacaagtgaatcttacaacgacaggaactatgacaatgactggaagtggtactgatattactacttctgccatatcgccattgtctcaaataaacttgtataaattattgcatcaagagaatcttggattgtggactataaaagaagctccgcttattgatagcgaaagatatacaactgtggatggccctataaagcagggtagtagtgggtcagtatgggcttctatcgttgatgctagaacatattatcctataaaatcaatacaaggggtagaagtggtaataaacccagcaatagagaagtatataataaaaaagaatgtgcgaatagaaggtgttgtttgtgattctttaaacaataagttatatggtaaaaagtataaattgttgataacaccatacctctataaggatgagaatatgtgcttgtatgaaactaattcgggagagttttatatgtttcccaatggtggagtttttccgtttaagatggggcgtagaccgctatatgattggggaaatataaccaatgatggagatattgttaatgtgactgttgagttaacttttaactacaattcaaaagaaatagtttttatttcttcaagatattatgaaccaacatattatcaaagaaccactgatgatgatataattttacatcaaggcataccttttattgtgaatgatccttatcgattttaaattgtgacttactgcaagttttggcagtttgaggatttatttttaatatatagctttaaagtatagggaggcgaaagtagaaccttattcttagcagaaatttctagaggtttataaatattaggtgtaactttttttaattcaaacttgttttctccgcgtattaggcaaaaagtagaggagaaagattgtgggggagtgaagtcaaggggggcttcgctccccttgttttaaataagcttttatgggagttatataaaaagcattatagtcatggttatattcttcagttcattattttctcccattatcagattcctgaaaactgcaaaggaatgaactaaacagtagtacacaatagtaactcaactctcctccttcgggaaggaggagtggtcgcagaccgaggtggtaggagaaataatgtttatacctatttctttgtaaatgacaggattatgtattcacctaccacctccccctacgggtactcctccttcccgaaggaggagaattgaagatagaaccgactatcatttagctcaaaaccgtgcagaaatgagctaaaccgtacggacatgaacataaactctataatattaccgatagtactctatgtggttagacttcaatggtttatagtttcctatcatttcttgtaatggaaactgtcgtttcccggtgagggaacggtcgttccttttaatggaaacgaccgttccttttaaagggaactggcgtttcctccgaggaaaccaacgcttgctctatatgatactgatacttgatttatatggactaacaatttagcgtataactgattcgaatatgaagctttccgctgtttggagttgatgtctttattttaaaagggacgaccccttccttataaaaaagaaagaggccgtggggataaaaaaagactggtggggtatttatatagagattaggatttattgtttttgcttagatgttggatgaatatctcttctgactgatattcttctgctatctgttttattctttcatcagtttgatctaatatgtaatttagttctgtttcgtcgaaacaatctcctaagtgtatgggagtatgtagtaaatctgaattctgatttgtttctgttgctaattgttgtctatgaactgtgacttcaatttctcccttttcatctgtagtgaaaagtaagttgtatttttctatcagggcaatgaattcttttaagaacttgtattctgtttcggtcaatacttttatcatatttgttcgtttggtgtttattttatacttggcaaagttctaatttctttttgaactttagaatgaaagtaatatgatttttattccatttgctaagttggaatattccttttattcatattaccacatctattcgtttttttcgtatatttgcttcgaacgaaacttttcatttgtatatttgttggattttaaaaagaaaaaagaatcatggaagcagaagaattaactgttgggagagttcatcatggacataacatacgtcgttttcgtatagaaaagaatatgaatcaggaggttttaagccaattagtacatttatcacaatcagcagtatctaaatatgagcagatgagagtgattgatgatgaaatgttacatcgcttttcacgggcattgggagtccctttcgagtatctgaagagtttggaagaggatgcgcagacggtggtatttgaaaataatacggtgaataataatgatcaggcttctgctaatattggtggctatgtggaggaaaataatagagtgaataattataatcccatcgaaaaaatcactgaactctacgaacgtctgctgaaagagaaggatgaaaagtacgcagcactggaacgtcgtttgcaaaatatagagcagagcttgcagaaataaagaacaaatataatgaaaggaatcgtgatatgatgaaacaaataccctatggattgacggactttgcccgaattcaaaaggacaattattactatgtagataagaccatgttcatcgagagaatcgagatgcaaccggcttatcttttcttgattcgtcctcgtcggtttggaaagagcttgactttggctatgctggaggcttattacgatgtagtatatgctaatgactttgatgagctattcgggcatctttatataggtcaacatccaaccccgaagcataattgttatctcattatgcggttcaacttttcggaagtaagttctaatgtcaatgaagtagagcgatcatttaaattgcattgctgtagtaagcttagggattttgtgttcaaatatgaagatcttttgggaaaagaaatttgggatgttctcgatgaagagatacagcaagatccgggtgcttttttatcagcaatcaatacttatgttactcgtaggggaaatctccctatttatttgttaattgacgaatacgataattttaccaatactattcttgcgacttatggtactgagttttatcggactgcaacacatggtgaaggatttattcgtggattttttaatgtgataaaagctgctgctacaggtaatggttctgcgcttcaacgtatgtttattacaggagtgagccctgtcacaatggatgatgtaaccagtggatttaatattggcactaatatcacaatcgatactttatttaattcattagttggtttcaatgagaaggaattaagggaaatgttggtctactataaacttcatgaagtttttaaactttcagtagatgatatgcttggtatgatgaggccattctacaatcattattgtttctgtaaaagcaagttggctgattgtgtatttaatcctgatatggtactttattttatgaagtcgtttttactacatggagagaaacccaatacaattgttgatcctaatatttgtactgatttcaataaattatcttatttatttcgacttgaccacggattgggggagaacttctctgttattaaagaaatagccgagcagggagaaataactacggacattgctacacacttttctgcattggaaatgacggatgtacgcaatttcaagtctttgttattctatttcggacttctttctattaaaggagtcgatatggtgggaagacccattctgcatgtcccgaatctggtggtcagagaacagctttttagctttttgatccaaggatatatcaaacatgatatttttaagattgatatgaaccggatgacgatgttatttgagaacatggctttcagaggagactggaaaccgttgtttaattttatagcagaggctatccgtgagcaaagccgtattcgcgaatatatagagggcgaagcacatattaagggctttttgttggcttatttaggtatgtaccgttattatcaactgtatccggaatacgaactgaataaaggttttgccgacttccttttcaaacctagtccgtcggttcctgtaatgccgccattaacttatctgctcgaagtgaagtatgcaaaggctggcgcttcggagaaagaaataagggcacttgccgatgaggcgcgggagcagttacttcgttacagccaggatgaattggtaacggaggctagagcgaaaggcggactaaaactaattacgatagtatggtgtagttgggaacttgtgctactggaagaagtactttagattcctactgcctttatccccttcgagtagttccagcattagtttcaagcgaatgaaactttcagtgagagcaaacgtttgctctcactctgctaccacagttgctcccattgctgtaaccctcatgaataaagggatatagataaactgttagagcatgagagcaaaactgctatcaaatcactgtggaggctatataatgtatctgcccgaatcatttatactgtacacgaagaaacagtaacaattgaggtgattgccgtgcggagctaagagccttacaggtaaaaataggaatggctacgtttgttatttatagatttgtacaggaagttcccctcttaatgcccctaaagcattaaatgctaatgactccatttccccttcaccgggatagacatgtataggggctaagaaagagattcttttcttcaatcttgaaatgatatagtccgagtaagcaatacctcctgtcagcagaatggcatctactttcccgtagagtacggtggcggctccgccaatggctttcgcaacattatatatcatggcatccagtatcagttcagcttttttgtcaccttcttctatggctttgataatggcgggaacatcggtagtgcccagatgggccgtcagtccggcacgtccggagatacgcttctttaattcatctttcgtgaactgtccgctataacaaatatcgatcaactgaccggcaggaagggtgccagccctttccggcgagaaaggcccttcgccgtctaaagcattattggcgtcaatggctttgccatgctgatgaacggctatagagataccgccacctaagtgacagattatcaagtccagttctttatatttcgttccctgctcctttgcgaagcggcgggcgattgctttctgattcaaggcgtgccagatggtgatcttaggcatcagcggagaacccgaaatacgcgctacatcttccagttcatccaccactcccgggtctgcgatgaaagccgggcaatcaggaagggaagcggccagttcggctgcaatcagtccgcctaagttgcaggcatgggtacgcatggcgtgcaaagtatcttgcttcatggcttcgttgactgcgtagactcctcccggaatgggtttgacgaggccgccgcgtccgatgacagcatcgaatgcaaagggtattccatttgcttctaattcctgaagaaccagattcttccgaaattcaaactggtctatcacctgcggataaacggataattcttcgaccgtatgcttgatgttacggacgagcaacggagtttcgttctcgtagactgctatcttcgtagaagtggagccggggttgatgaccagaatcttcatatctttggagttataaggtttgaattatgattaacggttcaggttgagcttctctctgcattcgcagccggccacttgcaggcaggccattgcgatgctgtaatacttcgataagccggaatcactgcgggaagggagcactaccggacagataggtccttgcaacaatcccgccatatccgcattggcaaacagggagacggacttgtagaacgcatttcccgattctatattggggaaaatcagcacatccgcctgtccgttgataggcgaaacaattcctttgatgtccccgctcgcctgctcacaggcagtgcgtacatccagcggaccgtcgatgattacatttccaaactctcccgcttcggcaagttccacgatgtttacataatccagtgaatgcgggaatttggcgctcactttctcggtacagtgtatcagtgcaacgcgaggctgctcgataccgaaatggcggcaagtgcagatggcataccagatcatttcaatccgttgttgcagcgtggggcgtggaatcactgcggcatcggagaagaacagcagtttatggtaagtcggaatctccatcactgccaagtgagtgaggattttccctttggggagcagtcctttctctttgtcgaggatggcgtgcagcagattgtccgtgttgatgatacctttcattaaaatatccgctcccccttcacgcacgatacggacagcttcgcgtgccgcttcgtccgaatcttcgatgtgaatggtcttcacatagtcgggatattgcttcaaggcaggatatttttccagaatagccgaatccccgatcatgagaaactctgcaattccttcttccaaagcacgggtaatggcatattccgtattagggtcgttggcgcagactacggcaattcgtttcctacgattctgttgtttaagatgggctgttagctgggcaaagttctgaataggttccataacgttagatttttagcaaatatcagaaaaatcattgagaaaataatactcataacccgaaaaattacgcctgttatgtaacattttgttatattttagttgttttagtgtgtagatatacaccgaaccgttttttcctgtatttttgcaaatgaatcccccttaaactttaaaacaaaatgaaacagttcagaaatctattatttattagcacattactcctttgttgggtactcgtttcctgcaaaacgacaagagttgcttcctccggctggtcgctggtatgggaagagaattttaatcagaagaaaggctttgacccgcaggtctggagcaagattccgcgagggaaggccgactggaataattatatgacagactttgattcctgctttgccatgcgcaaaggcaagctggtgttaagaggcattgccaatcagacactgcccaatgatacggcaccttatctgacaggaggcgtttataccaaaggtaaaaaggcattccttgacggacgcatcgagatatgtgccaagctgaatgccgcaaaaggagcatggccggctatctggatgctgcccgaaaatgccaaatggccgtcgggaggcgaaatagatgtgatggagcgtctgaatgatgactctatcgcttatcagacagttcattctcattatacgtacactttgggcatcaaggatcatcccaagtcacactccacaggagtcattcatcccgatcgctataacgttttcgctgtagaaatgtatccggacagtctttcgttttatgtcaacgacatacatacgtttacttatccccgcatacagacgcagaaggaaggacaattcccgttcgaccagccgttttatctgctgatcgatatgcagttgggcggttcgtgggtcggagcagtcgatcccaaagaccttccggtagaaatggaagtggactgggtgcgtttttatcagcgaaagtcactcaaataaaacattaaatatgaatattcaacttccttcttttttacagaaaggtgacaaagtagtgattgtgtcaccttccagcaagatagacaaagagtttctgaaacgtgcgaagaaacggcttgaatcatggggattgaaagtctctgtggggaaatatgccggaggttcttccggacgttatgccggaacggtccggcaacgtctgcaagacttgcagggtgcgatggatgatccgaaagtgaaagctattctttgcagcagaggaggatacggggccgtgcatctggtggacaagattgactttaccgcctttcgtgaacatccgaagtggttgctgggattcagcgacatcactgccttgcataatttatttcagaagaatggatatgcctccctgcattcgctgatggcgcgtcatctgagcgtggagccggaagaagacccttgcgtggcctatctgaaagatattctcttcggtaatctgcccgtttatacttgcgaaaagcataagttgaacaggcaaggtacggccgaaggtatcctgcgtggcggaaatatggcggtagcttacgggctgcgcggcactccttatgatattcctgccgaaggaactatcctgtttctcgaagatgtcagtgaacgtcctcatgcgattgagcgcatgatgtacaatctgaaactgggcggtgtgcttgaaaaactgtccggactcattatcggtcaatttaccgaatacgaagaagattgttcgttgggtaaggagctatatcccgctctggccgatttggtgaaagaatatgactatccggtttgttttaattttccggtaggtcatgtgacgcataatttgccgcttatcaatggcgcgaaagtggaattgaccgttggaaagaaaaatgtggagttaaagtttatttgttaataatccattctatctgaacgatactgtggtgaaaatgactaattttgaggcttcatatagataaaaggacgatgaaaaagaaatctatgatagtattgacgagtgcctttgtattattatctgctttttcttgtggaggaggcagcaaggcaactggtacgaatgaacaaagtgaaaaagtggtggtaaatgtacctcagtttgatgcggacagtgcctatttgtatgtaaagaatcaggtagattttggtccccgtgttcctaatacgaaggagcacgtagcttgtggcaattatctggccggaaagctggaggctttcggtgcgaaggtaacgaatcagtatgccgatctgattgcctatgacggcacactgttgaaggcgcggaacatcatcggctcttacaaaccggaaagtaagaagagaatagcgttgtttgcacattgggatacccgtccgtgggcggataatgatgctgacgaaaagaatcaccatacccctattctgggagccaatgacggagcaagcggagtgggagctttgctggaaatcgcccggttggtcaaccagcaacagccggaactgggcattgatatcatctttctggatgcggaagattacggaactcctcaattctacgagggaaagcacaaggaagaggcttggtgtctcggctcgcagtattggtcacgcaatcctcatgtgcaagggtataatgcccgttttggtatcttgctcgatatggtgggtggtgagaacagcgtatttctgaaagaaggatattccgaagagtttgctccggatatcaacaagaaagtatggaaagcggctaaaaaagcaggttatgggaaaaccttcattgatgagagaggcgataccatcaccgacgaccatctgtttattaaccgtctggctcgtatcaagacaatcgatataattcccaatgatccggaaacaggcttccctccgacttggcataccattcatgataatatggatcatatcgacaagaatacgctgaaagccgtcggacagacagtgctggaagtgatttataatgaaaagtaaatagttaactagtaaaccgtaaataacttcatgtcaattaatgaattacaagacgaagtgattgctgaattcagcgacttcgatgactggatggaccgctaccagctgctcattgacttaggtaatgaacaggaaccgctcgacgaaaagtataagaccgaacagaacctgatcgaaggctgtcagagccgtgtatggcttcaggcggacgatgtggatggaaaaatcgtgtttaatgcggaaagtgacgctttgattgtgaaaggaatcattgctttattgatcaaagtcctttcgggacatacgcccgatgaaatactgaatgctgatctttattttatcgataagataggtttgagagatcatttgtctcctacccgtagcaatgggttgctgtcgatggtaaagcagatacgtatgtatgcgctggcatttaaggcaaaagaagggaaataaaagataataaatttaggcacggattacgcggattacacggttttaagagatgcatctggcagaaactgtgtaatccgcgtaatccgtgcctagaaaaatataagctttcccttgtttaatcgcaaatttcctcctgatattccagtatatctgccggctggcagtccagcactttgcagatagcctccagcgtagagaaacgtattgccttagcttttccggtttttaatatagaaaggttggcgggggtgatatctattttctccgccagctcgcccagagatatttttctgcgcgccatcatgatgtcaaggtttactataattgccataattttattttctcggtttgggttaaatggtcagttcctgttcttctttcattttcagtccgatagcgaatgtttcggctacaatcaggcagccgagtcccaataataaatcagtcgtctgtagcgccaggggagcgatgatataatgttcaagcgcgaatacttctttcagtccccagtagttgacgacctgcggaatcaggtaaaacacgaaggacataatcagcagactacccagccagcgcaggcggcggacattcttccattcgaatatctgcgatttgttgatgctcaaaatcagcatgacaaagataataagtgcggagatggtgagcagtgcattcatgagcgaacaggaactgctgataatcagataactgtagttcacctcttttccggtgcgtaccgccatttgcgtatacatgacgggcactttctcattgttacgggcattgatgatcgtatccggtttgatcatggcgatcgtaggtacgacatccacaaagcggaaatcgcctgcaagcataggtctgtcacatgctttcgattccttgtgctgttctttggcaagactcattccggctttcatgcctgttccgaactggtatcctgtggtatacagagaaagtcccagaacaatgaataccaatatgctgagaatattcaaacgtcttttcatcgctgttatttttttagtccgtgatatttgtttcttctttccagggataatggacggtcgtacgacgcatcgcccagataactcctgccagtatcaaaactgctacaaaaatagcaattagataggagctagtgttcatcagatcgctcatattttctgcttccggatattttgtactgagaaatacggataacgaattattcagtatatgcatcagtatgcaggggatgaggctggcagtcttgtaatatgtccatgcaaacaggataccgatcaggaatgccggaagtatctgggcaggattgatatggaaaacaccgaataaaagggctgaaagcagaattgcctttgtcgggctgtactgctgtagcaatgctttggtgatggctccgcgaaatagcagttcttcgagtacgggacctatgacggctatggcgagaatgcctccccagccggactggagaatatcgaaggattgttccatgatgttgggaatccacttcatcagttccgccagtgcggatacgacgaatccgcaggtgaggacagccaatgcgctgaagaacagatacgaggatgaaacgggcgaccaggttattttctttgtgctgatgtatccggctttccataaatagatacccatcatcagctgaccggccagttgcgccggaatcataagcatggtgataagcgcgtctttgtctaagtttccggtagtggctaccagataaatcacacaggggatcatgactaaaatgggagcaatgatctgtgcgataagcagattcagtaatatcagtttaatagcagttctcatattcgtagtattcttagtattcttggatgggatacaaagataatcgtttgttatttactggcaatgaagctgcacagaaacatggctatcattgagatggatactaccagcatcgatatactcattaatgactttttcataaagtgttattttttaatagatgattaaatagaaaatgtttgtttttcgatgattatttatcgtttatcgatatgcaaatgtagaggtaagttttgagttggcaaaggaaaaagagattttatttatcgaaaaacaataaaaaagatatgtttttcgatattaacggactcgttgcagccgaaaagaggcttattaatgtggttaatttagagaaaaagggggatcatttctcctgtttggcggcgagtagaatggcttcagtttcttccgcatctttgtgaagctgtgcgattagttcgtcgatactatcgtatttcagttcggggcgtgtccgtttcacgaaagtaagccggataaatttatcgtaaatgtcggagtggaaatgaaggatattcacttcgattgtgcggttgggaccatttccgatggtagggcggacgcctatattcagcattcccatataggtctttccgtcgaatgtgacccatacggcatagactccgtctgcgggaatcagtttgtcgggatcatccacgcttaaattggcagtcggaaaaccgatcttccggcctacctgatagccgcctactaccgttccgtccagaaagtattcgtagcccagacagcgggcagctacgtctacatctccctgatgcagcaacttgcggattaaagaagaactgaccggggcactttgggtggtatctatctgtatatcatctgtgtaagcctgtgcacggatgacctcaatgccgattgcctgcccgtagcgtacataatcgtcaaacccttcgctgcggttgtgaccgaaacggtgatcgtatcctatcaccagatactttacctgataacgttcttttagtatctgagtcatgaattctttggcggtcagacgggagatgtcgggtgtaaaatcgagcatcaggcaataatctactcccgtgcctgcgagcaggtttgttttttcttcgggagtagttaaaagttccggatggtaagcggcgttcatcactttgcgcggatgaacggggaatgtgactaatgcagaacgcagacctttggctgccgctatctccttcacctgttgaatcagatagcgatgtcccatgtgtactccgtcgaagaaaccgatggtagctacgcatggttcgggaatcatagccgatgtgtcatttataatctgcatacttacattctcatttttttctgaaaagatggctccagtcttcaccggctttcggtgtgtaggtcgagatacccagttcctgagctactttacagtttatttcggaatcgtcaataaaaaaagtctctttcgggtcaatacccgcatcttcggtcaccgccttgaatatttccggttcgggcttggccattttcatttcataagagagatacgtcttctcaaaatagtcctctactttgaacgtacggtaggggaaggcattctcgcatacccatttccagtggatgtcattggtgttgctgagcagatagactacgtatttctcgcgtagtttgagcagcaagtcgagcttgtaggtcgggatgtctaccagaaagctgttccaggctgcgtcgatctgcttgtcgcttaccatctttcccatcatctcccgaatgccgtcacggaattcggcaggagtgatcagtcctttctcctgctgcaaaaatattccgtccagctggtgggtgcagaacttttcttctatgttctggaacccgatctttttaaagttctcaatacaacgttcgcggtcgagatttatcagtacaccgcctaaatcaataagtaagtttttaattcctttacttttcattattttctcatttgtgaatactacgttgaacaaggcgaataagttctccaacccataacaccgtggacgaaacgcctataatcagaagccacgtctgccagtcgagcggctctgtgcggaatacagctccaccgaactgtacgatcagaaattgtccgaccagaatggccagaacaatcaactccatgccatacgatttggaaagtcccttgaatgccgagtcggtagtgccgaatacgcgggcattgaacaggttccagaattgcagcatgacaaagaaagtgaagaaaatggtgaggttatgtacatccataccttgcgcgctgtggtcgaaataataaatcattccgagcaatacggcgaggaagattgtacctacacctaatatattgttacgcatcgctttgctgataataaagtcagtgctgcggcgcggtttttcctgcatgacggtttcgctgggagggatggaagcgagggccagagcggcaaaagtgtccatgatcaggttcacccacagcatttgtgtcactgtcagcggaagttctgttccgatcatcgatcccaataatacgatcagcaaggctacgaagttgatcgtcagctggaatacgatgaaacgctgaatattcttataaagagaacgtccccacatgacagcggtaccgatgctgttgaacgagtcgtcgagcagtgtgatgtcactggcttctttggctacggacgtacctgtacccattgacagaccgacttgggcatgattcagggcaggcgcatcgttcgtaccgtctccggttacggcgactacggctcctttttgttggagcagctgtacgagacgctgcttgtccgtcgggcgggcacgagacatgattttgaggtccatcacacggtccagcgcttcttcgtcactcagttcggcaaaggcaacaccggtgatacggtttcggtcggtatcagtttccggttgccacagtccgatctgacgggcaatttccgtcgcagttcccggtgtgtcaccggtaacgatcttgataccgataccagccgactggcatttggccacagcggcgggtacatccggacgaatcgggtctgagatggctacgactcctaagaaattaaggtcgttggcagacaccagttccgtgcagtcattcggttcattttctcctactattttgaaggcaaagccgagtgtgcgcattgccatattctgataattcagcaactgggcttctactgtcgaacgatattcgacggcatctacccgtcggccgtccagcacgacttccttacatttgccgagcacgatttcgggggctccttttatataaagtactttctttccgatgatcggagactcgacgagagtcgccataaatttacgttcggtcgagaaggtgagctggtcgaggatgcgggcgtgttcacggagttcgagataatttcttccctgactgttgagccataataacagggcgacttccgtagggttaccgacaccttttggcttttcgcccgttgccgcttcttcaaggaaagcggttgagttggcgctgatcccttctgcgacgagagcgctgatatcatcatcgcccaggttgccgccattcttgattccgtagaaattgggttcgtgtacctgcatcaggttttgagtcagtgtacccgttttgtccgtacagatcacggtgatagctcccatcgtctcgcaggcgtgcatcttccgcaccagattgttggtcgagagcatacggcgcatattcagggccaggctgagcgttacgctcatgggcaatccttcggggacggctactacaatcaaagtaacagccatcatgaaatatttgagggtccgttcgaaaaccggaagccactcgtgccagccgttcagcgaactgaaatcaaagtacaacagtacatcttttacaaagaagataagaaaggcaagtccggcaacggtaaaaccgattttaccgatcaggttcgcgagcttggtcaactgtatattcagaggggtcggttccagattttcttcggtgctctggcgtgctaccttgccgatttctgtggcatctcccacgtgcagtacgcgcatggtgccgtgtccgtccaccactgtcgttccgcgcatcactaagttggaggcataggttgcttcttcgtcaaagtccgcttcgatcacagtcttgttgattaccggttctccggtcaggttggattcgttcacttgcagggagatcgcttccagcagttgcccgtcggcaggaatctcttcgcctgtttccagtatgataatatcgtctacaacgacgtctttacgtgggatttcctgtacgtgtccgttacgaatcacttttacgagtgtttcttcattgacggcattcagtaagtcgaattttttattggcatcatattcgaaaaagaagccgatgcctgtggccagcaagatggccgctatgattccgatagtttcggcatattcattttcgatgatggaaatgatcagtgaaaatacggcggctaccaacaatacccgcacaaccggatcttcaaacttttcaagatagagcttccataaggaaggacgcttggggggtgttaacagattgacaccgttcttttctctgctttgtaggacttcgtcatccgtaaggcctacatgataataatcgtctttttttgtagtactcatgcaaatacatgcgtttgattaggaccgcaaaaatacaacataaaattgtgataaaatgtttaattaaaactttttatgaagttactttattcgggacgtccgcaagtacgatagggaatcgtaaaccagaacgttgatcccttgccttctacggagtctgcgccgatttgcccctccaatttgtttacgatggttttagagatggaaagtcccagccccgttcctttcttgtctttgttcagctttacgaagcggccgaaaacttccggtagtttgtcggcagggattccggctccggtgtcggtgacataaaaataaagttcggtatctcttgcctcataaccgatgctgatcgttccctcctgcgtgaatttaatggcgttggtggtaaaattggagagcacctgcgcgacacggttccggtcggtctctatgctacaggagggaaggcttggttctgcaattatctggatgttttttcctgcgtcgttgactctcatttggaaaagctgccgcaagtcggatagtaacagattgatatctacctttgtatatacaaattccagtgtaccggcttctattttcgacatatccaggatatcgttcactagttgcagcagcagatcggcattcatctttatgatctcctgatattgtgccttttcttcttctgtattggcgctggcgagtacttctgcaaatcctgtgatggcgttgagaggcgtgcggatttcgtgactcatattggcaaggaaggcagacttcgaaaggtcggcattttctgctttctctttggcaagtgtcagttgcttttctgtttctttaagttgggtgatatcgtgcacggtaagtaccatattctcttcttcgttaaggagaaaataggaaccggatatcacggcgtcacattctacggatttcttttcggaagtaagcacgttcagagtagcttccagatcagtgaagcctcttctttgttcgaaagcctggcggatggcacaacgtatggggcaggaaccacagtaagcatgagtaccgcagcctccttccgccgataatgcgttgcggcattgcaataagtcgcccactctcttttcttccagacctttctgagttccggtgagttgatagtagtttgtttttaatactttgaagtcgttatctattaataagatataggcatggacatttttcagaatggcgctggcgatgtggttggtatgttccagctttctggattcccggaatagtcgtttttgcatccgaagacattttctccgttcccatagatagctgagcaggaggattgcacatataattagcaggataggtagcaatgctattagcatgatgtaacttgttggttttgttctacaaatatgttgcaaagataacttttttactcgggataagaaataagttcgaacaatttgcattttatttgcgttatattatttagtaaaccaataaaaaaacgaacgttatgaaaaagtacatttgcacagtctgtgaatacatttacgaccccgcacaaggagatcccgagagcggaattgaaccgggaacagcatttgaagacattccggatgattggacttgtccactttgcggagtcggaaaagaggactttgaaccgtacgaaggataaaaaattaagagagagaagagattattaaaaaaatgaccggaaagcagtgcttccggtcatttttgcgtttcagctcatgcagagctttttttgttcctgtttttatactgtcgggtcaggtgcttcctcatcgccgccgtcaccgccgccgtcggggttgggaggagtaggagtgtttccgttgtcaacgatctcgctgccggttaccagtttttgaatacttgcctttttcagcatatccttaaacttgtatcccggagtaaatacgatcttcacccgacgaatcgtgtcggaatccactgccgcttctgtctcctggctttcgctgctgatgccgggacggaattgaccgaaatcacccagttgtacggaaatacctttgtttaagtttatattcagcgtatcgatcagtgcatcgagtacaaacttgaccgctccgctgggaaccattcccactttagaaatctcatcacacaaatccttgaaattaaccgtattggtaataaaattctgtgctacatacttttcggttttctctttaccgaaaccaatcattctttttttaacgacatacctaagtgccataatcttttttgttttttaatagttagtaaatctgtttcttttgttttgtgatcacgatgcaaatgtatgtgtttccaaatgaactgccaagcaaaaaactcaaagtgcgttaataagtttcttcaactaaagaaatggtcagatgtttttttgttgttctcctttcatctttttccgattgaagattgtccttttcatatcatatccatacctttgtagattcaagaacccaacgtggctccggtggctcaggagccgggatgtccggagaacgaccggctaggcgatggaaagggaatgaagaatatgaataaagaattaacggatgtagtataaatgatgacttcctgtttattaagaatacacagtttacgctttttcgacggaggcttgcatgaggttcctgtggaagaagtgatgacggttgcgcttattgcgatattcatctttgttccgtgcctgtggcttgtccggtatttaaaagataagaggctggactcggacgagaaagacaagtttatacaaatacatattatctcgaccattgtcctgactattgcgggcggtgtttttgcacggatgttcggacttgtcaataaatggatagacgaacagccgttgattattgctgtttacatcgctttggcgcttagttccctcggcatcattgtcggaaaaatgatcgacttttgggtgtattgtctccgaaagaagatgttttaagtatctgtatatagatgcctgcagcctctgcccgaagaaggttggaaacaggttttgtccggtatttattgctaaagtacggttttgagtttctctttgtataattgatattattgctccttctatcattcatcagagatacatagagcattttaataattattggaataatccataaaacatataagtatgaagaatagttttagaatattaattatcacaaccttatctgtagtattaatatcatgtagaaccgtaaaagcacagtgtggtttttcacttatgcgtgatacagttacaaaaatggatgtttatcaagttgttgatgagtttcctagttatccaggtggtggaagtgctttgctacagtatgtgggaaagcattatcgcgtacctgaaaatgatgtgcaaagtacattcaatttgacttttgttgttgataaaactggtaaattgaaaggggttagaatccacaagaaaaacagaaaggaatatagtaatgctgataatgctatgattaaagtttttaattctatgcctgcatggaaaccaggaatatgtaacggaaagaaggtgaatgttttgctgactcaaagaataaatgttcacttagaataagataggattataggagataagtttacaattgttggttaaaatgatattcttttgttgtgatcctaaacgttatgctaacagcggtcatttgatgttccgctgttattttctctaggtattttgctaaaagtcttcttccctaataccatccagtatgttttcatacatattggctatccataaaacatattctccttattcatctaatgagttcaattagggacatacgctatatgcttcacattttcttcgcataaaccacctgttttcctgctccgtagcgcatcagtatcccttttttgataaaagcgttcagctcttttagtgcacgctttttgtcgtgaccggtcatatagcaataatcagtgcgagtcatgcaaggatatttttcaaggtgggcggttattaatgccagacattccgcttcgctacgtccgttacctttgggccgggtgagggattcggtacgttccaatctcatgtcataccctacttcccgcttgaattgtttggtcggtagatagttgatgttttttagtttgattgattgtgcacgcacatctttcttgtgcattacgggtggtccttgcagcgatacggagaaatagccgatctcgcctaattctacaatccagccgttagccagtaaatcttttaactcattttgaaaagactgcattgctcctgccagcaaactacggctgattcctgtaaatttgtgtacgcggtctagaaattcgtcctgaccgatagtccctttgggaacaatgcggggatgaaggggttgtttttctcctgtctgcttgatatcgggagtctcgtaaaggtcatactgtgcgctcataacttaagttattttgttgtgttattaatgtttccgctcctataaactaaggaatccggcttaaatattaattcgttctactacagttccccgtgcggaccactagagtgggacacaaggggaactatagttcttctttcgtgccactatagtggtacgaaaaaagatttgcatacaaagttattaatattaaagagaaaagggttaaccttacgaggtttttgcgttaattatttatttccagccgcaattcctcttgcatcaccttgcttttcccatcctttgtgtatcggtacgacagcagaaatacattataagtatgaccgaaagattcctctaccttgaatgtattggggtatttggagtcaccgtctatctgagttacctcaatatccttgtacggctttatcgtgacatgattgttttcctccacttgcagtatgatggcggttttgttgatgtgatccacattgctttcaaaagactccgttccggctatcacgcgtacgctgttgtgggtgagtggaaacatcttcttgttacctgcggttgccatcccgtctgccagaccggtcattgaatagtaaacgttttcgccctgcgttgcataatcgttcttgataagtatttgatatagaatggtgtttttgctttcattaatctcgacaccggagatatccgtagcttttaatcctacgaagtaggtagaatccggcgacagtccttcgggacgtatcttgatcatggttctgcctgtccgttcgcctgcattgatctgaatcttgtaatctacgatctcgtatttgtcactggacaggaatttggcatagcaggcttcatcgacgtcgtaaagagaccggttgtagaattccagtgaagtcaggtcttcttccagcccgatcaccatgttttgttttggggcatgggtacctccggtgcaggctgcgatatatcctgtcgcctcttctccggtaggggacaaggtgaccacttcttcaaacgtgttatagtagtcactgctgatcagggccactacattcttgtacatttccttttcaaacagcgcatcgtcattgcatgacgaaagcgctgtcataagtgcgagtatcgttataaaatctcgtttcattttcttttttgttatttagattaataacccggattctggtcgagagaaggcagtcttctcatttcgttgcgtggtatgggcacccagacagaccttttgtcaaccaccctcgtcaggaatgaggaagaactagggatgacacgctggtagtaggtctctttggttgcgccgtcgggattcattccacggataggttcctgctctgtctcttcataaataccccagcggcggacatcatagaaacgtctgttttcccataaaaactctaccatacgttcgcgttctatctgtttctgtacttccggcgtactgttgagttgattggctgtcagccccggcagtccggccctgtagcggacttgattgaatgcttttttaatttcctctttatctctgctcatggtataaggctgaccgtccagttctacggtgtgggggccggtcaggttgttgagtgcctccgcatacgatagcaggatttccgcatagcggatgatgggataggctttctggatatggcgggctccggtgccggtccaggcatccatcgggttattgtactttttgattacgtatccggtgatgggatagttgggtgaggtggcggtaacaccgccacgaccgtcttcatcctgatagtagtacttggctgtgtggttgttgagagtcgaactggataatgcctgccatactgcctcattgaatcctacagacgcgtagaaccgcatttcacgattggcgtacatcttatatacaccggcgttgaggggatagccggaaaagttgcgcggttcggaagtgaagcctgtctccgagtaatatccgtcggcggcggcttcttctttcgtacggccgtcgtccatcagataggcgtctaccactttctgagtgacgcagaaacgtccccatccacccatcgagggagggaaagaacctttgctgatggtttcgttgaggtacgtcgtgtttcttccccagatcaattccgggttgatggacgctacggcttcgccggtaaagatgtccgaataagatttgaaagggtctattccgtcggctccgttcgggtaggcgtcatagaaattggggtcggaagtgactccggcgggaagctccggcgtgttgtcgtcttttgcatacgtatagagcttgtacgctcccatatccatcacccgttttgcggcggcagcagctactgcccaccggctttcgtcatattgttgggagacataatgcacaccgtcggtcttgcgtttccagttgccgaaataggagctggcaacaggcccgccgttgaatagcgggctggcgtgtatcagtcgcaggcgggctaccagaccgagtgcggctcctttggtggggcgtccgaagtccagcgtagaaacatcctgaggcgagggcagcagccgtgccgctttttcgaactcctcacaagtatagttcattgtttcgtcataggtggccctggggcggtcgtagtattcgataggttcgttggtattcactacttcgtctcccagcaagattgccggaccgtaatcgaccaaaagattgtagtaggcgaaggcacggataaaacgtgtgtatccttccagtctgagccgttccgagtttgttaggtctttcgggcggtcgaggttttgcaggatgctgttgcacttacggatgattttgtaatacttgccccattggttcaggttgggggagccgtctccgaagaaatcctgtgtgatctttccgttggcgaaatccatgccgtgatagatattggccgttccgcttccggtcagtccgttaaatccttcgtcggtcgccatcggtcccggtgtgtacccgttacggatggtctgtgcctcatccgggaacatggctgccgctccccacatatacgcttccatatatcgggcattggtgaaaaccgagtcgatgttgaattcatcatcaaagtaattgtctatgtttaagaagttgctgcaagacgttaccaacatgactgcctgaaccaagaagaacattcttgctgttttttttattaaggatgttttcattttatcgtttatcgggtgatgtatttattagagattgacatataattgcagggaataggtggaagggatgggatatacacggccgttccagcgtgcctgttccggatcgaagagtttcactttatcccatacatggaggttgttacctacgaattggatatccagtgaagaaacacctatgcgtcttagaaaagctgtcgcaagatggtagctcagggtgatttcctgcaggcgtatgtagcgtgaatcgccctgccaaaaggtggacaactggctgttgttgctgttatttccatattgcaggcgcgggaaacgcgcatccttgttttcggcaagggatgggtcgatcccgtgtgcgatggcataatctttgggaatccatcggttggccggattggctgccagggtgagtacgtttccggtattaccttcgaagaaaggcatatatcccattccgttgaggcgggtttcgtcgttcaccgtcgtcttttgacctacatagaaaaaagaggtcttgccggttcccttgaacaatacacccagagtcagattcttgtagcggatttctgcccccaggccgtacatcagcagcggataagtgctgtgtgtcaacggcaccatgtccagcttgtccaccataccgtctccattgatatccttatatttgatgtcaccgggcattacctccccgaaagtctgcttgggactgtatttgatgtcatcttcgtccttaaacagtccgactgcctgatatccgcggatggaattgtacggaaaattattgtattccaggtaagggtactccagataagcctgctcccagttctgtactttatttttggagtacgtgaaattgccccgtaaggtgaagccgaaatcgggagtgaagtcctgcgtgaagctgatgtttccgtcggcaccgtaacttttcattttacccacattcgcgtatggattggagactactcctacgaactcgggcacctgtacccgttgctggaaaataccgttacgctgatcatggaaaatatcgacaacgaaatcgatcttgttattaaacaactttccttcaatacccacattggacttgatagccttttcccacgccaggttatcggctccgatacgtgtctcgccaataatctcgatgtcgggaacgccccaagctgatccggtaccttcgttcactttagtaaggtaagggaagcggacgtcggtaatccggtcgttacctaccgaaccatgcgaagcccttattttaagatagtcgagccaggggagcgcctcttgtataaacttgtagccggtaggcacccagcccaatgcgacggatgggaagaaaccgtattgtctgccgggctggaagttttcggaaccggtgtatccgaagttgacgtccagcaggtaagtatccttgtagccataagtaaaccggctggatactccctgatagcgcaagggaatggccgataagttgcttgtggcgtcgtccgtgtctttagaatcgctgatgtaataatagaccagcgcggatgtccggtgatctgtaccgaaaagccggtcataattgagcgtagcctcaaagtggtatttgcggtactggcgggtggacttgctgtacgaggcttttttctcctttacggtctcctgcatgatgagtgatccgtcgcttgctctgcccagcgcattgtagagggccggctgcacgcttctccgttcattgaagtagctgtggatatcgtatgctccctgtacacgtaatttaagcccgttgatcaattcggaaaagtcctgattgattgccaaagttgatttgcccttgtacacttcgttggcagcctttcccgtatggttgatcatgacataaggcgatgacagctctccggcaccgcgtccgggcagcataccattggaatattgggtgggaatggacaatggagtaagccgagactgtgctccccatatatattcggtattggctacgccgggctgattcaactgggagaggaatccgtcagaacccaaataaactttcgttgatttggtcaggttcacgtctagattgatacggtaattataggtgttgtagctgacgttcgaactgtatatactgttcttgtctaccttataggccgcactttcgtttttaccgcccaggctcagaaaataacgtgccacatcgctgccgccacgtccgcttacataataagtatgacgccagaatgttttgttgagtatctcatcctgccagtttacgttgggatagaggtcggggtcgagaccgtcgcgtataattcccatttccgtatcgtcatacaaaggtgtttcgttccgcaccgctctggcttcgtttgctaactgcgcatactcataagctcccagatattccggcaggcgattgaggacggacagcgtggtgttgaaacgtccggtaatctgaattttgcccgaaaggcctttcttggtgttgaccaagacgactccgttggctccccttactccgtatacggcagttgccgacgcatctttcaggatggagaaactttcgacatcggcagggtcgatggtgttgaggtcgccttccagaccgtcaatcagtacaagggcactgctgttggctccgaacgtaccgataccacgtacccaaaaatcggcaatattctgaccgggttcgccactgctttgcaaggaaatgacaccggctgccctgcctcccagcaagttactgatggaaggggagggggactggatatctttagtgctgaccgtcgtaatggcacctaccgaactgattttccgctgaacgtttcccagtgcgacgacaactacttcatcaagggaattgttgtcttcaagcaatgtgaccgttaaatcggttttgggctcgatggccacgtgctccgacggtttgaaaccgataaaagaaaatatcattttgtctccataaaccactttcagcttgaagttaccgtcattgtcggttgtggtacctttggagggtttgtctttgatgtacaccgatacgccgggcatggataacttgtccttatccacgactgttccggaaatggtaaattcctgaacttgctgcgcgaaggttgttgccgaaagcaataagcagaacgacattaagtataaaatctgtttgattttcattgtgagtttactttgttattcgataactaatttgcgaatgcgtgcattaccccagtctgcaatgtaaatgtctccctgttcattgacagccactccccagggattcttgaataaggactctaccggtcctccgtccttgtatccggcgacgccgggctgtccggcaactgtcgtgacgatattgtcggcagataccatgcggatgcaatggttgccatagtcggcaacgaacatattgccgtcgttgtcaaacttgatatccttgggataattgaagagggcatcttcaatcggaccgtcacggaaagcgctgccgccgggagcattgagacgcttaaatccgcctgttccatccggatcgcggaggtcgagcaccgaaatcccttgtctgtatgcggtaggggcgttggagtgaagcgttatatacagaagccagggcttcgcaggattaatcgcctgtccgtattgtgatccgctggggccttgatggataatgtgtccttcgaatgtgtcgggatctattttagcgatctttccatcacggtatcgtgtatatagatagccgtcgtaagggcagaaggtgacgaaattcttgtatttgtcggcatctacgattgagttcagatccgactgtgagtattttatgttacgctggcgggggtaccaggcttcacgcgggtcgaaagtaaatgtcacttctttgaccgattcgtgcgcggcggtcagcattccggtggcacggtccaccgtcaggccgttggcatataagatgcggttggcggcatctgcttcaatgagcggagtcacaatgttctgttgttcgtttatccgggcaattccaaatgtaccaccgtcacgccatgacatgaaaagattgccttcggcatccagatcaagatatttgccatacacctgagcggtggagagtgttccggcaaggaagctcgtttcaccgtttccggtgaccgtgctgaccaatgcctgcgtatgataagcgtatgtttcttcgtaagcgacggaatcggtgtcaaccactacggagatacggggattatcgcccggaaggcgcggcacaatagcataaatacggcttccgcttgatgaaacgacggaggctctggcattgttgaaatataccttgattttactcacgtcggttccgaagttttctccatccagaagaattttatcacgtgccccgccttctttgggatagaaggaggtcagtgcaatcggtttatcggattggtgggttttctcggtgggatcactgtagctttcgcaacttgatagatagaagaaagctcccagtaagcaggttagtgataagtaacgattcataaagtaataatttaaaattaaatgattatccgtctatagtccgtcggatatcttgatattacacggttttgatggctggaactttatagtttgatggtgtaattcaaacctttatcgggggctacgatgaagttggtaacttcaaaattgcagtcgcctcttttgataccgttttccaacttcacagagattgtatgctgcgtatgtggtttcaatgtcatttcgcggaaatagaccaaagaaggatcatgtgcggtctttttcagtttcagtaccagatcggtagcgttcatgacagaaaatgtcacttctttttcggtgcgtttcacttcttttatgtctacgcatttttcaaagaagggacggaggatttcttcacgcccgatcaccagttcgcggtaataaacggcagtgcggcgattgtcgagtgcttcacggataccttccggagaacgttctttggcaaagacaaacgtcatcgtgcggtgttcgccttttgaaaaatcatagtctgtctggataggctggtggatatcggaagttcctatcatggtcagattcttgtccagacaccattgaatggcttcgggcatgaaaagaccaccattggctacttcaatgccgtgcatgcagccgtcattgtagagttgtgtatgctcaggccaccacagggtggagtccggctgctggcgtgcccagcccggatgattccagaagataaaggctccttgtttttttgcctcattgaaagcgtctttatatgccttttgttccaatggattggagtcgttcaggaagattgcattaaaatgtcccggaggcatggaacgggtgatttcactgcctctgattagaagtattcctaacttcttcgcctgcttctgagacagttcataagagcggttatgatctgctatgatgtcttttttgtgcgggcggtactctatatgttctgtcagagaaatggcatccagtccttctcggtatgcttcgtctacacgtacggtaggccataccagaccgtccgaaaaaacactgtgcatgtgaaagtcacattttaaagtagtgtacccgttcagattgggaacttgaatctcattgcggcgttgcgcttgtgcgctcattaaacacattgctgccagtgcaactcccatcaatacttttttaattttcattttttttgctttaaattagagatttggttttcttttggaatgcctctgtccagtcattggaaaatggtactaaacataggcccctgtgtattttggcgcaaatgtatatgcaaaaaaaagacctgcaataggcgcagtaaaagcttaacgggaacttcacggaaaagaaatgtaatcgttaacgtctgtaaaaaatgtaacgcctttgtaaagtatgagtgtccttgtaaacggacatgagttgttttgtctgtgtggaaataaaaaagaaatggatagccaatttatgcgttgcagcataaaattgactatccatttctttgattgagttcctctttatttaagaggctttcttctcttttacatcactgctggcttctaccacattcactacatagtcgcccaatttctcacattcggcgataatatccatataatagactcccatctgataatcatattccttgttgttgacatccagaatattctgatttttcagttggttacggtagttattgatttcgttttcgatgttgaaagacttgttgatatcaatgctttggtgttccggtttctctaccaccacaatcatttgtgcgagggcatcatcggtcagcttcatcatgaagtggatgtgctcgtattgcttttcggtaaagtcctgattcgtctggcgtttccggttgatggtgcgtgccaggttgtaacagctgtcgccgatactttcgatttccgtcacttcgcgcagcatggcacgtatctgcaacttactttcagaactcagacgcccttcggatacctgattcagataattggctatttcaagttccatgttgtcgctgatgttctcgtacttttctacgcggctgaacagcttgttaaagtcatcgtccttttcggtgtgcatcaagtcctgcaccattccgaacatacggtgggtacgttctgcaaacaggtggatttccttgcgtgcctgcaggatagaaagctccgcagtagaaagcataccgccggtgataaaccgaaggcgaggttcctcgtcttcctccttcgggtggattaatgcgcatacggtgcgttcgatcagtttcactccccatatcaggatacatacgttacagatattaaagatagagtggaaagcggacagtttataagaaatggctacttccggattattgctctggaagaaggtatccactacccagttgaccagttccatgaaaggatggaagatgatcaatacccagatcacaccgaacacattaaaaacaaaatgggccaatgctgcccgcttagcctgtgtgttggctgttaatgcggcaagattggccgtgatggtagttccgatgttttcgcccagtacgagcgctgctcccagttccagactgatccagccgttggcgcacataattaatgtgattgccatcgtggcggctgaggcctgtacgatcatagtcagtatggtaccgatgaataagaacaggagaatggagaagaatcccatatccgtgtagttctgtacgaaggcgagcatttccggattggcgttcaggtcgggagcatttgctttcaggtaagaaagtcccatgaagaggaaggaaaaaccgaaaatgaattcaccgatggacttgcggttgctcttgccggagaagatgagcggaagggcgatggccagaagtggaagagcgaaagcggccatatcaaccttaaatccgaaaattgaaataatccatgccgtaaccgtcgtaccgatattggcacccatgatgacactgatggactcggccagggtaagcaaaccggcgttgacgaaactgacgaccattactgttgtcgccgaggaggactggataagggctgtgatcaacactcctgttaatacccccgttacccgattggtggtcatagctgtcaggatacttcgtagcctgtcacctgcgactttttgtaagccctcgctcattatcttcatgccataaaggaagagccctaacgagcctatgagctttaaaaaatcataaaaagaatattccatctataataattttagtggttgtttgttctctatctgattactaagtatatttagtcccatgttattcaccttattaaaaagactacgatgaaacagatgttacaaatatgttgcaaaaataataatatttataaagaattccctatcggaagctcacttttggatatttattacggttttaatcttaattttccttatcaggtagtcagtgccaaggtgaataaccgttccgaaggtctcaatttcaaagtatataataacaaggatatagagtttctggatgtgcgcgattcatccggtatgcgtacgtatgtgcggtcactctgctttgtcttgttcaaggctgtcagtgagctttttcccgaagggaagctgtttgtggaacacccggtctccaaaggttatttctgtaatctgcggatcggtcgccctattacattggaagatgtgacgcgtatcaaacagcgtatgcaggagattatcgcagaaaatatctcttatcaccgcatcgaatgccatacggctgaggctgtacgggtgttcagtgaacgcgggatgaatgataaggtgaggctgctcgaaacttccggttcactatatacctattattatacgctgggcgatacggtcgattattattatggtaatctgctccccagtaccggatatatcaagttgttcgacatcgtgaaatactatgatggcctcttgctgcgcattcccaataaagagaatccggatgtgctggaggaagtggtgaagcaggagaagatgctggatgtatttaaggagtatctcaactggagctatatcatgggacttaataacgccggcgactttaacctcgcctgcgaagaagggcacgctacggatttaatcaatgtagcggaagcattgcaggaaaagaaaatagcccagattgccgatacgatcttccatcgtggggaaaacggtgaccgggtgaaactgattttgatttccggtccgtcctcttcgggaaagaccacgttcagcaaacgtctttccatccagttgatgacgaacgggctcaaacccttcccgatctccttggacaattatttcgtagaccgtgaagagacacctctggatgaaaacggtaactatgattatgagtctctgtatgcgctcgatctggaattgtttaaccagcagttacaggctttgctgcgcggtgaggaagtggagcttccgcgttttaacttctctctggggaagaaggaatataaaggtgataaactgaaaattgaggataatacgattctcattctggaaggtattcatgcgttgaatccggaactgacaccgcatatcccggatgaaaagaagttcaaaatttatgtctcggcattgaccactatttctttggacgaccataactggattcctacaacagacaatcgtttgcttcgccgcattatccgcgactttaattatcggggatattcggcccgcgagactatctcccgctggcctagtgtgcgtgctggtgaagataaatggatattcccttatcaggagaatgcggatgtgatgttcaattcggcgctgttgtttgaatttgcagtgcttcgcctgcatgcggaacctattttgatgggtgttccgcgcaattgtccggaatattgtgaggcgtaccggttgctgaaattcattaaatatttcgttccggtgcaagataaggaaattcccccgacgtctttactcagggagtttttgggaggaagtagcttcaaatattagataataaatttatttaagagaattattttggaatttatagttattgtataaatataagttcgtaacttcgcgccgcaaaaaacaagcgtggcaatatgttgttgtattccagggaaaggaaataactgtaagattagacttaaataatgaacatttgtacgttctttccgtttatgttattacacagcaaaaaaagggtatatgatattttataacaatttactagcgaaatgctttttagggaaaaagaagcattattttatgataggagggttattctttactcggtacaagtatttggaagtttgggaagaaatggagttaagaatacatgcacggcaattctgggagtgttttttattgactttaatcccagcattgggtttgtcactatggttttcatggtggtggatggtgcttccgttcatgacatatcacttgctttactggtttgaaaaagcaattagttctcattcggtttttaactgggaggcattgacctattgtggtgatgccgtttatatgagaaaaagaaaatcctatgcctggatgaaatggtatgggaagaaaacttttccgaaatcggaatgggaagattaaaggaatagagagacgttaaaactctcttgcggatttattcaggcacggcttacacagattaatatggtttcgattaaaacagaaccataaaaactctgtaagccgtgcctgaataatgatatgataacagttatttctgctttcggcggtttttccttttctactgcttttatttcagatgtttctttatccaaagcagatgtccgtactctgtgtcactggaggtccaatgttcattaataggagtgatcaatgcttctttcgggcaattcaatacattatatacaatgtagctggtagtcggtggacaaacgtcatcattgaatccccatgtcatataagtatccgccctgattaattgggcaaagttcaccacatcataataagccattgttctgatcttttcgggagtatccatatctacggtatttcggaagaaatgggggtaacctccggcacgaccggctttgtaacctgccatatcgcttagagccggatgattggctacgcaggccgttacccgctgatccagtccggcggtgacgagtgctaatgctcctccctggctgccgccttgaacgattacattctttccgtcccattccggtagtgaggtcagtaggtcgatgctgcggacacaggccagatatacccgtttcatgtaatagttgtcgcggctgtccagaccgttggacaagtagccattttctctgccgttgaaagcggcactgatttctttgaattcttcttcgctcatttccgggttcagcccgtgaatctctatttcaaaacggatgcagccttgttcggcgtaatacttatgtcgcaaaggttccttgattgttttgattcctgcgcccggaggacatagtacgacagggtatttgccttctttcttcggatagaacaggtagccgtagatactttgtccgcgttggttcacctgcaacttgataagatagcagtctatttggtcggtcgagtatttctttacgtgctctttggtgtatgtcagcggaaatttggccagttccgccttttcgttctcccagaattgctgaaagtcggcaggcatggtggtatacggacggagcttttccggcgagaaacccactttgacgtgatgggagtatttctttccgtctacggtggtggtcaggcggcagtctcggaagcccggtttcttcatggtgcctacggggattgttgcctttccttttctcatgataattgttcccttggtatcagcaggcatcatttctccgcctatttcgaaattaatcgctatgttatctcccggaatgccgtatttgtaaaactgtacttctacatttgcctgttctccagttttgtaaagccagtcggcatgatcgggtacggttacccagaatacgtcactccggtagggattattttcggcaaccgcgagcagcgttgtcagtaacaacgctgctgatacgtaaaatcttctcatattcattttactgttcaatataactgtcattcgttttctcattctattttccatctgatcggtttgttaattacgccgcaatattagggaagattagaaaaacagaggtcgataaaatgttctattaagtgtaaatttagagcaacttccactcgaatgtatgttttccggcttctaactctatgacacgttctcctttcacagtatcgggcacgtataaagtggcactgctgttggcaggaatcgtcacgctgtacacaacactttttttcttacgttcccattgggactgaatctctccgtacggagaacggtgtctggcctcaaactgctttaaatcactggggaagttggggcgcaggaggatatgtttaaaacccggctgctgtgggtcggggaagataccgcccaagcctttatagaaccatcctccgatttctccgaacatcatgtggttgtccgaaatgtcacgtgtagcattcaaatcccagttttcgagcagggtggtggctccgttggcaatccagcagccccatgacgggtaggtgtcttgtgcagctactttataagcggtttcggcttctccgttttcactcaaggcgttcagtatggctttggctcccaatacacccacatccagatggaaaccggcttcttccaccttcttcgccaggttgcgggctacttttgctttcatatccttggggacaataccccacatcagcggtacgctcagttccgtctgaacgccgctggcgtatatgccggtttccctgttcagatatttgtcattgatcgcttgcctgatcttttccgcaagcgcctgataatgtttgtaatcttcctgcttgttgaacagctttgcggcattggccagtattttagtatctacatagaagtataccgatgaggtcagttctttggacgaatgcgatttcacaggaacccagtctcctcttccccatgaagtcagtccgcttgggctggtacggtctacgtagtctatatatcgtttgatgttttcgtagcagtcggctaataatttgctgtctccgtagaacagataaatattccagggaataatggcgattgtactcgtccagtccagaccgttgtccgtgccgtatccccatcctccggtcggaatgatgtcgggtaatactccgttgggttgctgttcgtcacggtggtcggctagccatttttcgtagactgtgatgccgtcataattatatagtgctgtttctatcgcaaaatgtccgtctcccgtccatccgtttttctcccgttgggggcaatcggtgggataccccatcagattggacagataggcgttgttggtagcccaccacaatcggttcacgagtgggtttgacgtgtttatctctcctttttgcggaacgtcgctatgaacgaaataagcagttagactgttttgatcgagtgcgacaggcttactgcttgttacttctacgtatctgaagcctttgtagttaaaccgtgccataaactcgtcttctccctttccgctcaggatgagaatatccatctggaatgggtctttgtcatctaccggacgatggtatacgtcaatgtttgacatattcacccgtccgttgtcatagatgcgttcgccgtgtttgagccttactaccgttccttcttctccggataccttgatgcgggtcactccggacatatttctggcaaagtcgaatacatacgtcgtgtcgttcactttcttaagcgcttttgccggtattgtttctacgatacgaatcggttgtacctgctgggatacgacgttttgagaaggtacagctctgtaacctgcttccttccatttcgaatcgtcaaaatctgccgtattccagcctttctgttccaggcgggcgtcataatgttccgctgtatagatgctgttgaagatcaaggcgcccgatgaagtcttccagtctctttcggagcggattacttctgtagtaccgtcttcgtaggtaattctcaggtccatgcaaaaagcggggcggttacgccacggtgcgcggtcaaagtcccagactgcttttgactgatggttgtaccagccatttcccagcagtacgccaatcgcgtttttacctttctgaagttggttggtcacatcataagtcacatagaaattccgtctgtcgaaacgggtatacagcgggtctagccgatggtttccaattttctctccgttgatgtataattcgtataaaccggcgacggcgatgtacgctctggcggatttgactttcttttgagtgtcgaatgtttttctgaaatagggggcgggcttatagttgatgtctctgttgtcgccaatccatgcgccctgccagttttccattcccatcattccggtctcgaagctgttgatgtccgaagtagcctttttgccgtccttatcccatacattcactttccagtaatatttggtaaagggttgaagattcttttccggataggtgacaaggatttgatccgattcctttttccccgagttccagatttccccgttttcgttgtttgctttcagtgagtctgtgctgactattatctgataggcagtctgccgggctccttgtcgggcatcgtccagcatccacgacaatctgggattggcattgtcgatgcctagcggattgatcaggtggtcgcaatgaaggttcacgggcttgcattcttcttgcttttgtgcaagggtcggttgcagtgcacaacatgcaagtgcagtcactaaatatatttttttcattctgtctatttgttttcctttttaaccacaaactgatatgtaccggactgtagttctaatactgcctttccattcatgaaagtaaccgaagaaactccttccgctttcacggcagtttttccgctttcttctactacatagtcgagagtaggtaatagtaagtgaagagtggcggtggtgttggcaggtatcgtcacttggtaagaaactgttccgtcattttcttttttccagctgctctttatatctccataacaggaagggaacgaagcatttacccagtcaatccgttcctgaccggcggcaacttccggacggttgtctggaaccggctgtaatacgatgtgcttgaatcccggacgtgtttcgtcgatatctataccgcccattgtgcggtacatccattcggagactgctccatacgagtaatgattgaacgagttcatcgatacggggccaaaacctttctctttggtatacgaatcccagcgttcccagatagtggttgctccctggtctatgctatacagccaggaagggttgttccgttgcagcagtagatcgtaagccgtatttgattctccgaactggcttaatgtctgattcaggatggctgtacccacgaatcctgtgctcaggcggttaccgttgccggcaatcttgcggaccagtgtttccactcctttcttacgtgcttcttctgtcgggaataaatccagtttcaaggcaagcagataggccgtctggctcttttgtttcaaatctccgtctgcatcgatgtagcgtgtctggaattctttcttgatttcctgtgccagctttctgtaagcctttgctttggaggcgtaggcatcacagtcgtccgttttcaatgcttccgaaattttggccatcaattgtgccgtatatgcgtagtagcatacactgacatagcggcgttcggtatcttcgtacgatagccagtcgccataatttgttccggcaccgttatagttataaccgtctcctttttgacgggacaggaactccatgtatttctccatagatgcataattgtcctgcaatatctttttgttgtcgtacatcagatagatagtccagggaacgatgataccggcatcagcccaggctgcctgtccgtagcctacccatgagtgtggggctacatccggataggcgccgtcacttcgctgaccgtcacgcatatctctcatccatttttcgaagaaggcggatacgttcgcattataagaagcggcacggcagaacacttgtgtgtctccggtccagcccagacgttcgtctctttgcgggcagtcggtagggatgctcagatagttgcctctttgtccccacatgacattgctgtataactgattgattgaccggctgctggtgacaaacgaagctccctcttcggtagcggaaccgaccacttcccctatcagggaaagtacctcgatgtcttcacttgccgttatctcacaatactgaaaaccgaagaaggtcatggacggatggaatgattcgccttccttgcttcctttcaggatatacttcaatgttgcttttgcacttctgaggttggcggtatatatacttccggcagggccgtcgtctccgcgtgatttatctcccgtgtcgttcagcatctcgccgaaacggagtttcatctccgttcccgatgcaccttttactttgaaccgaacccagccgaccatgttctgacctaagttgtagacggccgtttcccctttctttagccggataggagccggtttgtccgtaacactcactacattgattttaccgtctttttcaccttggtaaacagtagtggacaaagggatacggctcagatgcggacgtacctgaacggtgggaccggcaaaggcgattaactctcctttgaaatgaggattgacagccgtcttgttccagttggcagtattatatccgggcttcgtccatccactttcttttcgggcgtcataagtttctccgtggtagatgtctcccattcgtatggcaccgtccatggatgacagccaggaaaggtccgttactaccgtttccgaagtgccgtccgtatatttcagtaatatctttgcgatgaatcctacttcgtgactgccatactctccgtggcagacgtcactgttccaccagccggaggatacctgggcgccgactgcgttttctcctttccggagcaaatcggtgatgtcatacgtctgatagtgggctgttttgctgaaatccgtccattccggcttcaattcgtcatagcgtatgctgccgtcttccatcttgtttcctacccgttgtccgttgataaacaaatcatagacgcctagagccgaactgtagatgcgggcggatgcaatcttcttttttgccttgaattctttacggaacatgggtactccgctcatgtcaacctgcaatacccgataatcgccggaaccggaaaccatattcagtttacgattacctcccacagatacgatttctccgccttcaaaagcggactgaggtttctcgaaatcctctttcagaacgactttggcttcttccttgtcgcctttctgttcgtactctgtcagtacgatattgtcaaacatggccgtttcgttggtgttatttcctctgaatgcccggaagccgatatatccatttgatagtttggaatcggtgtcggtataggtatccaccagtaccttgtcaatataagtcttgaccactccatcttttgcttcgattgccagatggtgttctttattcagcaagtcggatttagtgaagaatttgccgatcggagtatccgaactttgcaggcgtcccctgtcataaatatgtcttctgatcaaaggctctttttcattgtccagcgtattgacagaccacatgaatacgttggaagcatcgcgtgcgccgaaaagaacggatgcgttgccggaagtcagtgtgacatccatttccagcagcattcgtgcctttgtctgtttcttgtcttccggattgattttggaattcttgtttatttgagttgccttgatccattgcgctcccgaccatccgtcggacagcagtcctgtttcgaagaaagccttttccgtcgaagtctcttctccggttttgttgttccacacggttactttccaataatagcgggtggaaggggtgagagccggtcctgcataacagatgtgcaatgattcgtcagatgccacctttccggaagtccagaccggatttagacaggctgcatcggtcgctaccgtgatttgataggctgtttgtctgactcctctttccgctgactctagttgccagctgaatcggggagctgttatgtccagcccgataggattggtcagatattcaacctgtagttttttgattgctgcattcgtgggcagcagaaaaagaatagataaaagtaacaaagtagttcgtgccattagtttaaagtaccttaattccgcaacactttgatttaactttatttataagttcctgagcaacaaaaagttgctcaggattttgccatgtcagatttttcacttatcttagtgttgcaaatcaaaacaagcgtaaatcgtaacaagacatggcaaaggtacaaataaaatctgaaaaactcacaccttttggaggaattttttcaatcatggagcaatttgactccatgctttcacctattatcgaccagacacttggtcagagatgccgcagtatcatcggataccagtacagcgaaattattcgttctctgatgagcgtatacttctgtggcggttcatgcgtggaggatgtaacatcgcatctgatgcgtcatctctcgtatcatccgaccttgcgcacatgcagctctgataccatcctcagagccatcaaggaactgacacaggaaaacatctcatatacttccgataagggcaagacctatgatttcaatacggcagacaagctcaacgccttgcttataaaagccttggtttccactggtgaactgaatgaggtggaaacctacgatgttgatttcgaccatcagttccttgaaacagagaagtatgatgcaaaaccgacatacaagaagttcctcggctacagacctggcgtatatgtcatcggtgacatgattgtctatgtcgagaacagcgatggcaacacaaatgtgcgcttttatcaggctgagacccacaagagattctttgccctactggaagccaacagcatccgtgtgaatcgcttcagagccgactgtggttcgtgctcgaaggaaattgtcagtgagatagagaagcattgcacgcacttctacatccgcgccaacagatgcagttcgctctacgatgacttgttttcactgaggggatggaagacggaggaaatcaacggcatccagtttgaactcaattccattcttgttgagaaatgggaaggcaagtgctatcgtcttgtcattcagagacaaaagcgcatggatggagagcttgacttgtgggaaggtgaatacacctacagatgcattcttaccaacgattatgactcatcaacaagagacatcgtcgaattttacaacaagcgtgggggcaaagagcgtatattcgatgatatgaacaacggattcggctggaacaggctccccaagtcgttcatgtcagagaacaccgtattccttctgcttacggcattgatacacaatttctataagaccatcattagcaagcttgacaccaaggctttcgggctcaaggaaacgagtcgcataaaggcttttgtcttcagcttcatctccgtacctgccaagtggatcatgacagcaaggcaatacgtgctgaatatctatactgaaaaccgggcttatgcaagacctttcaaaacagaattcggataagaatcctttctttccggttagaatctgcgtattacctcaagtcgcatcgtggggtaaggggatggtggctacatattgatgttgtgctgttgctttttactgaaagctgctactaacgactcataaatctacccttaatcgtgtattggatgatagttgcggattttaggaagtattaatagtttgttatgatgggggatacttgcaaatatagtgcttattgtcttggatagacataagaattttgacactaatacttaaaaatatgaccgtccccttgaaataataaatgcctatacttgttgtagtacaggcatttatcgttttatgtgaattccggtgccatctgtgaataaagcaggggttatcttaaagcttccacttcttcgggtgtcagcggaattttcttgccgagtcggcgggcacctgtctccgtgatgagataatcttcttcgttgcggataccgccgaagtctttgtaagtttccactttgtcgtaattgataaaattggtgaacttcttttctgctttccacatatcaatcagttcggggatgaagtaaatgcccggttctacggtatgtacgaatcccggttccagtggaatggcgaggcgttgcgacttgcgtccgaactgcgtgctcttcggctgaccgttgtatcctacccatatctcacccagattttccatatcgtgaacatccagtcccatcatgtgtcctaatccgtgcggatagaacagggcatgcgcgccttcgcggacagcatcttccgtatttcctttcattagtccgagagttttcatgccgtctaccatgacgcgggcggacaattcgtatacatccatataaggaatgcccggacgaagcgccttgacagattccagatgcatcgcattctggatttcgtaaacttcgcgctggcgggttgtaaatttcttatccgcaggaatcgtggacgacatatcgccggcataacccgactcgacttccgcgcctgcgtcaatcaggaacagatcgcccggtttcactttattcccgtgataatggttgtgcagcgtctgcccgttgatggtggcgatcgttgcaaacgacagttcgcagttgttggactctgccacgcggttcatttccgctactacttcatattcgtacattcccggacgaagcaccttcatggcggtgatgtgcatatcggcagtcacgtcacaggctttttctatttctacgatttcttccgccgacttgtagttgcgctgagctatgacggcacggatgaaaggtacggaaccttcctgacgtgcaggcggtatacccagccagtccatcagtttcagcttatgttcggggcggtagggaggaagataatgaattgcttttccactctggacgcatttgtgcagatagccgacgatatcggcggaagccatcatttccctgatgccgacacgttcgcatttttcgcgtaacgtaggctgtgagcccatccatacgatggcatcgatagacaattcgtcaccgaaaataatttctttgtcttcgtcaatatcgatgatggccgaaagtccggcacacgaaagaccgaaataataaagaaaagtggagtcctgacgataacggaacgtgttatcctcataattcagcccgcactcgtcatttcccagaaataacaaaactccggagcctaaattctttttcagcagggctctgcgctgcatatacgtctctttggcaaacatactgtcctaatttttaagttcgtgcaacaaagataaagaattttgtgttataggattaaaaataatcccactaatctgtgtaatctctcgttaaaaagttacttttgtagcgagaaacagtagaaagcaaaaacgaatatggcacaaggttcccgtcaaatacaatcgcaggcgcaacagcagatacaaacgctctcgccacagcagattctggtcgtgaagttgttggagcttcccgcagtcgagctggaagaccgtatccatgctgaactattggaaaatccggcgcttgaagaaggcaaagaagacgctgccacagatgaatatgccgatggcgtcagtccggaagaaggcatggataacgatgccaatgattatgattctttaagtgattatctcaccgaagacgatatccccgactataaattgcaggaaaacaaccgctcgcgggacgagcaggcggaagatattcctttctccgacgccacctctttttatgaaatcctgaaagaacaactccgtgaacgtaacctgaccgaacaccagtgcgaactggtggaatatctgatcggttcgctggacgatgacggactgctccgtaaatcgctggaaagtatctgtgacgaactggctatctacgccggtatcgaatctacggaagaagaactggaagaggctctgtgcatcctgcaggattttgacccggcaggtatcggagcacgcaaccttcaggaatgtctgatgatacagattctgcgcaagaagagcgaagagaagaagccgtcaccgatattgaacctggaagagcgcatcatcagtgactgttatgaagaatttacccggaagcactgggagaaaatcattaagaaactggatgtcagagaagagactttcaatgaggcgattgccgaaataaccaagttgaatccccgtccgggtgcttcgctcggagaaaccatcggaagaaaccttcagcagattgttcccgattttctggtggatacctacgatgacggaacgattaacgtaagcctgaataaccgcaatgttcccgaactccggatgagccgcgactttaccgagatggtggaggagcataccaaaaataaggcgaaccagtccaaagagtcgaaagaagccatgatgttcctgaaacagaagatggatgcggcacaaggatttatcgatgcggtgaagcagcggcagaatacattgatgactaccatgcaggcgattatcgacttgcagcgtcctttcttcctcgaaggcgacgagtcattgctgaaaccgatgattctcaaagatgtggcagaacgtaccggactggatatctctacgatttcccgtgtcagcaacagcaaatacgtacagaccaacttcggcatctatccgcttaaattcttcttcagcgatggctatacgacggaagacggagaggaaatgtccgtacgcgagatacgtaagattctgaaagaatgcattgacggagaagacaaaaagaaaccgctgacagatgacgaactggcggatatcctgaaggaaaaaggctatcctatcgcccgccgtacggtggcgaaataccgtcagcagttgaatataccggtggcaagactgagaaagtgagtttaaagtattaactataaagtattaagtattagtgctgatggataaagaaaaagagcatatcatagcggataaaacaatgttgcgggtggcacggatcacctccatcgtgtttactccattttctataccgtttctggcgtttctggtgttattcctgttttcttatctccgtatcatgccgatactttataagggaattgtgttgggaatcgtttactgcttcaccatactgacgcccactatcaccattttcctgttccggaagatcaacgggtttgcccgtcaggaactgagtgagcgtaagaaacgttatgtacctatcctgctgactatcatttcgtatgtgttctgcctgctgatgatgcggaaactgaatattccctggtatatgaccggaatcatttttgtttccctggtgatatcgatcatctgcattctggtcaatctgaaatggaaactgagcgaacacatggcggggatgggcggtattatcgggggactggtttcgttcagtgcgctgttcagctataatccggtagtgtggttgtgcctgtttattctgattgcaggcatattgggctcggcgcggattgtgctggggcatcacaccttgggcgaggtcctttccggttttgtagtcgggctggtctgctcttttttgatactccatccggcgtacaaccttatattcagagtatttttattttaaaaacaatataaatcctaaaaactaattattatgaactttccacagaacttgaagtacacgaatgaacacgagtggattcgcgtagaaggagacatcgcttacgtaggtatcacagattacgcacaggaacaattgggcgatattgtattcgttgatattcctaccgtaggagaaacgttggaagccggagaaactttcggaacgattgaagtggtaaagaccatttccgatcttttcttaccgttggcaggcgagatactcgaacagaacgaagctttggaagaaaatccggagctggtaaacaaagacccttacggcgaaggctggctgatcaagatgaagcctgctgatgccagtgctgcggaagacctgctcgatgccgaagcatacaaggcggtagtgaacggctgaatttgaataaacagtacttctgcctctccccatagggggaggtggtaggtaaatgaatgtatgtaataacttttagattagatgaaaatgactccaattgtaagtatcatcatgggtagcacgtccgaccttcctgttatggagaaggctgcgcaactgctgaatgatatgcatgtaccgttcgaaatgaacgccctttctgctcaccgcacgccggaggctgtggaagagtttgcccaaaatgcccgtagccgtggcattaaagtaatcatcgctgctgccggaatggctgccgcccttccgggtgtcatcgcagccaacacaacgcttccggtgatcggagtacctgtaaaaggctctgtgctcgacggtgtagacgctctgtactccatcattcagatgcctccgggcattcctgtggctacggttgctatcaatggagcgatgaatgcggctatccttgccattcagatgcttgcattgagcgatgccgcattggctgaggcttttgctgcttacaaagaaggactgaaaaagaaaatcgtaaaggcaaacgaagaactgaaagaagtgaagttcgaatataaaactaattaattgacaattgacaattgacaattgacaatgggctggcgctgtgggtgctttgttgagcttgttgttgattctcgattctcaattgtcaattgtcaactgtcaattgtcaattgaaaagatggatttattcaattactttcgaagagaaacatccgaagtaaatattggggctgtacctttgggcggccccaatcctattcgtatccagtcgatgacgaacacgtccactatggatacagaagcttgtgtggaacaagccaaacgcatcgtcgatgccggcggcgagtatgtacgactgaccacgcagggtgtcaaggaagcggaaaatctgatgaatatcaatatcgggctacgaagtcagggatatatggttccgttggtggctgatgtgcattttaatccgaaagtggccgatgtagcagctcaatatgcagaaaaggtacggatcaatccgggcaattatgtagatgcagcgcgtacttttaagaaactggaatataccgacgaggagtatgcgcaggagatacagaagattcacgaccgttttgtgccgtttctgaatatctgtaaggagaatcatacggctatccgcatcggagtcaatcacggttccctgtccgaccgtatcatgtcccgctacggagacactcccgaagggatggtggaatcctgtatggaattcctgcgtatctgtgtggcggaacatttcacggatgtggtgatttcgatcaaggcttccaatacggtggtgatggtgaagaccgtccgcttgcttgttgccgtgatggaacaggagggaatgtcatttcccctgcatcttggagtgacggaggccggagacggagaagacggacgtataaaatctgccttgggcatcggtgcattgctttgtgacggattgggagatacgattcgtgtgtcgcttagtgaggctcccgaagcggaaattcccgtagcgcgcaagctggtggattatgttctgttgaggcaggatcatccgtatatcccgggtatggaggcaccggaatttaattatctttctccttcgcgccgcaagacgcgggcagtgcggaatatcgggggcgaacatctccctgtcgttattgccgaccgcatggatgggaagacggaagtcaatccgcagtttactccggattatatctatgccggaagaacgttgcccgaacagcgggaagaaggagtggaatatatccttgatgccgatgtatgggaaggggaggccggaacatggcctgctttcaatcatgcgcagttgccgttgatgggcgagtgcagtgcagaactgaaattcctgtttatgccttacatggcgcaaacggatgaagtgattgcctgtcttaaggtgcatcccgaagttgtggttatttctcagagcaatcatccgaatcgcctgggcgagcaccgtgcattggtgcatcaacttatgacggaaggtctggagaatccggttgttttcttccagcattatgcggaggacgaggcggaagatttgcagattaagtccgccgttgatatgggagcattgatttttgacggtttatgtgacgggattttcctgttcaatcaaggaagtctgagtcatgcggtagtagatgctactgccttcggtatcttgcaggcaggacgcacccgtacttctaaaacggaatatatttcttgtccgggctgcggtcgtacgctttatgatctggaaaagacaattgcgcgtatcaaggcggctacctcacatctgaaaggcttgaaaatcggcatcatgggatgtatcgtcaacggtcccggtgagatggcggatgccgactacggctatgtaggtgccggacgcggaaaaatcagcctttataaaggtaaagtttgcgtagagaaaaacatacccgaagaagaggcggtggaacggttgctggaatttatccgcaatgatcggaaagaactggaactttaatcagttatacttttaaatagttaaaacaggagttgctttaagtttgcttaaggcaactcctgtcttttattatagtatacacaaacatttatccgtacaaggggaagataatcacccgggattaatagtaggagaaccgttcattaggctattatgtaggttagattaatgtattccgtcagtaagaagaagtcatttcacgtacatgggtccatcagtccacgtacgtgatctattgggttcatgtacgtgaaccgaacggtccacgcacgtgaaacgaatacatgaaacgtactaaatatattagtcaaaccttgttagcttgttaaggttactatgctatggcttaatgcaggcggcatacattaagttatatatggcataaacaacgcatattcacgctgaaaatggagtttttaacacatgcggataatgcttctgaatagtctgttttatagttgttaatcagcgtgttaatcctgttttttattaaaagcaggtgataatagaaaccagaaaaaattctattatcaccttattatcaccacctattatcaccattactgccttaataataaggagcttatcctttaaaagtgacaagtgacaataacaaagtgttttattaactctagtgagagacggttggaagcctaagggcatttttcagccattgcatacagcgcatgacgaaagattcgtgatgcaggtttttggtttgttcttctatctgtatttccatctttcgctgcaattcttccagcaatgcttttcttgttttccgtattatttcctgttctttttcatgtgttatttcttgttcgtccttcgaatgccttttctgattatcccgaagcatgtcaagttggtcgtgcaatattttgtttttcaactgcaacctttggcataattcatcataatcccgtattttatgttctaatatatcccgttccatttttagccggagattgacagactctttggctgtaaacgctccgttattaatcttgcgtcgcaattcgcatacgatagaacggaattctattgctatttcttccggtgtttgcttgtgaaagtcagccagacgttttagcttgtgtccttttacgatggagcagaagatgctacgctttttgttatccataatttgcagcgccaatgctttaacgactatcgggtagaggttgaaacattcgctctgcaagcggatgtagaattctgcttcttcatatttgagcatctcgttcctgatagctttatccatattccggatgagcttttcgtgattggttcttttaagtgccagtgtttcttctaaatccatatcgctttcgttgttttgattgtcttctaaaaacgactgggcgtccatgcactctccctaaaaaaaggatgtggggttggggtaaaaaaaaggaaaggcacggacgctgttgtcgtttcactattcgactgaggtgttggctagaccctttagtgatagtgattaacaacagacatccatgccaattttatatatagggatgctatataacaatcagcatggaatatctgttgcatcacttctcactaaattcaagtagccaactttcagtgcgaagaagtaatacgtttatattccaatatttataaaaaacatctttcccctacattcacgtcacgctgacggggagaaaggtgtatgcaaagataagtgtttattctgaaatctcaacgaaaagcggggatttcttcacatacgactatctccatgccacgatagacgaccactattttgtggagcgtcgttgtgccgatagctttttgtactgtttcgctggcggcatagctgaatcggattcaagcaagtatcctgcttcgagaaggaaaaattaaagtttggccgttggctggatgtggtggattatgagttattgatttagttttctggtgacttatcattcattttttcttcaagtagtttgagtagttcgttgcaagcagtatccatgtattctttgccttcttcagccaaaacatccggattataagacagtttcacagaatcggatgtgatgtcacagcttacttcacatccatctgacaagtattgaatataaatacagaatgggaaatcaaaagtattatcgcctgcatatcggcaatgattaaaatgaaaagttactgcatcatattttagcttaaagtagtcaacctgagatttcttggataaacgtatgatatcctctacaaagccatactcttttgacttagtatataaaatgtgtgactggataattggctcatcaggattgggtgtatttatttttctagccatgttccaagtgggagtgttggttataaatgttctgtcaaatagcttttggagtccactgatcttttgctccacataaacggccaattcaaaaaaagcatttcttgcctgttctacggaacgactgcttttttcgatagctttatctgagtatctacgctgtaacatcgctattttcttatcgaaatcaccttcttcctctatgctttctcccttggcggctttgattgcgagtgtcagactgcgtatcaagcaactgctcaaatagttgacgaatggtaatatatcattcaaagtggcattagcaccatctgaaggggttaatcctgcttctacatcacattgatggaggatgttcagatagttggatttatcttcggagtgaataacgatcatcggatatccataacggtgcagcacaaagtttactaataaacgggcaatgcgtccgttgccatcttcgaagggatgaatgcggatataacggtaatgaagcaacgccgccaattcaacaggagtcagtattcctttgtctgcttccaggttgtaccagtctaccaagctcgtcataaatgccggagtttcttcgggcgaagcataactgaaaacttctcctgttgcggtcagtacggaattggggcgtgatttatattcgcctacttttatctgcatacggatgtcttgtccgtcgggtgttttggcgttcttccaatagtcctgcacaaggatggtacggttcaactcgcgaataaaactttcagtcagcggacgttctttgtcctgcgcctcttgctttatcatttccagtcctacgttgtgagctttcatctcttcataatctttcaagctggcattacccgaagtttcaccgaacattaataatagttttgtttgtccgtatgtcagtgtatttccttccaagtggttagagttataattaaactctaacttgaatttatcattccaacgtttcaggtcctcaggcttaagaggctgaagcgatttccattcgctatataattgttttatattacttattcccatttatatatgtggggctgtgcccattttttttgtttagatacaaaaataggaaactttctttatatgccaatcccttgaacgatatttatttggagattggctgtggcgtcttcttttgcaactttgttgcacgaatcattcgctacctttgcagcagataaaaaagaaagaatgattatgggacattgtagttgttgcgcacatacacacgaatgtgcacccgaaaaacatattgaaaagaaagaatcaatattcgctgaatattggaaagtgggactttcatttatcctgttgataagtggaatcatcatgaacgctctggagttacctttcttccgtgaaggatatttctctctgatatggtatgtcgtggcttatcttccggtcggcctgcccgttatgaaagaggcttgggagagtatgaaggataaggactatttcagtgagtttacgctgatgtttgtagctacgcttggagcgttttatatcggtgaatatccggagggagtagcggtgatgttgttttactccgtcggagaactgtttcaggagaaggctgttgataaggcgaagcgtaatatcggagctctgctggatgtccgtccggaagaagcggcagtagtcagagatggacgtgtcattattgagaatcctcaaagcgtaaaagtaggagaaacaattgaaataaagacaggaggaagagttcctttggatggaatgatgctcaatgaggtagctgctttcaatacggcagcattgacaggcgagagtgtcccccgaagtatccggatgggtgaggaagtacttgccggaatgattgttaccgataaagtaatccgtatcaaggtgatcagaccttttgataaaagtgctcttgcccgtattctggaacttgttcagaatgcctccgaacgcaaagcaccggcagaactgtttatccgtaaatttgcccgtgtttatactccgattgtgatagggctggcggttctgattgttttattgccgtttatttattccttgatcactccccagttcttatttacttttaatgactggctatacagggctttggtctttcttgtgatttcatgcccgtgcgctttggtggtcagtattccgttaggatacttcggaggcatcggggcagcttcccggttgggaattttatttaaaggtggaaattatctggatgctgttacgaagattaatacagtcgtgtttgataagacgggaacccttaccaaaggtacgtttgaagtacagttttgtaactgtgaatccggtgtatccgaagaagaattaatccggatgatagcctcggtagaaagcagcagtacacaccccattgctaaggctgtggtgaattatgccggacagcgggatatcgaactttcctctgtaaccgacagtaaggagtatgcaggtctcggactggaagctgccgtaaatggaattcaggttttggcaggtaatgggcgtttgctttcaaaatttcagatagaatatccacccgaacttctttccatcacagatacgatcgttatctgtgcgataggaaacaagtatgccggttatctgctattatccgacagtctgaaagaggatgcaaggatcgccatccagaacctgaaagcattgggaattcaaaacattcagatattatccggtgataaacaaagtattgttagtaactttgcagagaagctgggtatttcggaagcctatggtgatctgctccccgacggaaaagtgaagcatttggaagaattgcgccaacatacggagaaccaggttgcctttgtgggtgacggtatgaatgatgctccggtactggctttaagtaatgtaggtattgccatgggcggactaggcagtgatgcggctattgaaacggctgatgtggtgatacagaccgaccagccttccaaagtggctgaagcgataaaggtaggaaaactgacgcgaaggattgtatggcagaatatttcactggcgtttggtgtgaaactgctggtactgattttgggagccggtggactggctacactttgggaagctgttttcgccgatgttggtgtagcactgattgctatcatgaatgccgtaaggatacagaaaatgataaaataaaagaatatggaagaaaaagtttatctggataagttggcaaaaagagacatcaagccgacggctatcagacttctcatattgaaaagtatgatggaagcggggcgtgccgtgtctcagcttgatcttgaaacgttgctggatacggttgataaatcgactatatcccgtacaatcacgctttttttgtctcatcatctgatacatagcatagacgacggaagcggttcgtggaagtatgccgtttgcgatgattcctgcaactgtgtcctgaaagacctgcattcacatttttattgcgagaaatgccatcggacattctgtctggaaaagattcatattccggttatcgacttaccgaaaggattcactttgcatagtgtgaattatgtagtaaagggagtgtgtgcggagtgctcaaaagtgtaggattaattgcagacaagcagtaatggtaaaagaaaaacaccggaactcgaacggaaaaatatcgttgagttccggtgtttattatattaatgatactggttagtcaatattgggattcaaagaatgccagtctttgattgccgggatgatacccatttcaatcacttcatcgcgaagtttgcacagatgttcgtagctcttttccagttcttcctgttcggaaggagaaccggccacttctttgtaagtaacgccatctttcgtaatggaagtttccatagccatcatgatgtggtcgaacttaccattggaaacataagtaccggcaggccagcggaacggttgtccacccattgcggcagcgatcatttcgatagaaagataagccgggctttggaaagaagaacggccacgaagatcgatgatatgtttgccaccctgtatgacacgtacttttaatgcttcccattctgtcagcggaagacgggtagttccgatgaaatcagtcagcggttcgccttttactttggtagttgaggcgaatacggccatctgttctccatgtccgccatacgtacggcagttttgaatgtcggaagcgggaatatggaaatatttcaccagttcattctgcagacgggtgctgtccagtgctgccagtgtagaaacctgggatggtttcagaccggaatatagcagtgtgatcaatcctgtgatatcagcagggttaaagatgacaacgatatgttttacattcggacagtattggcggacatctttaccgaactgagcggcaatttcagcatttcctttcaacaagtcttcacgggtcatgcctgctttgcgggctgcaccaccggaagatacgatataagaggctcctgtcaatgcttctttgatatcggaagtataagtcagattcacgccttcgaaaccgcagtgatataattcttctgccacgccttccagagcgggtgcgaaaggatcatatagacaaatattcggagtgagtttcatcatcatagctgtttgagccatattggagccgatcattccggctgctcctacaatcgtaagtttctcgttggttaaaaattccataattatatatgtttaaagatgaataatctgttcttgcttattaccgctacaaagataacgacttaatcggatgattgttcattgaaaatagttttgtttgataacaaaaagttatatttattcaaagaacaagagggccagttacgtgaactgaaccctctcttcctctttttacccctcgtgtaaacaattagtctaccactttaaaaagattcttttctcctgactggctgtccggtgctacccagagggcgaaatctcccggttctaccgtctttatcatatcgatattccagaaagcgagttcactgatgggaagttcgaaagatacagttttcttctcacctggttttaaagtgacacgggtgaagcgtttcagttcttttaccggacgggtgacggagcctatcatgtcttgtatgtacagttgggcgacttccgttccttcgtacttgcctgtattttccagatcgaaggtgactgtcaatacgtcgtctttcttcaaattgtcggaagacaatttcacattaccgtactggaaggtagtgtaagacagaccgtaaccgaatggaaacaaaggatcggaacctgcatccatatagaatgaggtacagccgagtgaagtctgacctgcttcgagggcaatgtcgtctatcagtacttcgcttctcgtagcgggacgtcccgtattattgtgagcataataaacaggaacctgaccgaccattttggggaatgtgacaggtgtcttcccgctcggaacagcctttccaaaaagcaggtctgccaaagcaggaccgcccatggtgcccggatggaatgaatagagcagggccgaagaaagttccgtttcctttccgatagtcagcggacgtcctgccatgacaatcgttaccactggtttaccggttttggcaagggcggagatcagttcgctttgcgcgccttgcaggttcaggtctgccaggcagtgcgcctcaccggaaaggatggcttcttcacctacaaaagcgagtatgacgtcggcacgtgcagcggcagcagcggctttagccacacctgctatgtttttgtcacggctgtatgtcagcccgggttcataaatgatttgcactttgtcgtctgccagttctttgattgcggtcagcggagtcattgtatgggatttttcgccatcaaatacccaggtgcccaactggtcgtatggtgcgtttgccattggacctactatggcgattgtctttacagaagattgtagtggaagcgtttcatgatcgttcttcaataagatagcagactctgtggctgcctgtttggcggcttccaggtgagaaggagcataaaggacattggctttctcatccacgtaagggttttcaaacagtcccagacgatatttgattcgaagaatattgcgcacggcgttatctatctccgcttctttgactttgccttcttttatcagccccggcagctccttgacaaatgtgttgcccaccatttccatatctactccggcattcaccgctttcattgctacctccttagagtcagcggcgaagccgtgagcgatcatttcggtagaagaagcccagtcggtaaccaccagtccgtcaaatccccattcggaacggagtacatctttcagaatgaacgaattgcctgtggagggtactccgtcattatcgttgaaggaggtcatgaatgttgctgcacctgctttggaagcagcttcgaacggtggaaggtagacgttgcgcaaacgacgttccggaatgaaggtcgaattgtaatcccttccgccttctgccgcaccgtagcctacaaagtgtttcgggcaggaagcaatcgaggtaggactgttcagggagtcgccttgaaaacctttcaccatggctactcccataacggtagtcagataggtgtcttcaccgcatccttccgccatacgtccccaacgaggatcacgggcgatatcgatcatgggggcgaatgtccagcggatacctacggatgaggcttcgatggccgctacgcgtgcgccgtcttcagccacttgcgggttgaacgatgccgcctgtcccaacgggatggggaagatggtcttgaaaccatgaataacgtcacgtgccatcagcaaagggatgctgaggcgggactcctcgatggcaacgcgttgcagcgcattgatgcgtaccgggtcagtttcattcaatatagagccggcaccgccttgttttatcaatccgctcatgtcttcaatattgccgtaagaggtgatttggttcatctgtcccagtttctcttccagtgtcattttggacaacagagcttctactttcttctctatcgctgtgtcgcctttgtcattcgtcacttgcgtacaggaaacgaatggcaggaggaaaaggcacgcggagaaaatctttattactttcatacctatcaaatattattttttttgaaatacacgtacatagtcgatctcgtaagttgcgggaagggccgactcatccaccccttgtgcaccaccccagtctccgccccatgcgagattcagcttcagatagaagggggcgttgaacggccaggtgttcctgttgttggccttgtcattgtcgaagcggaaaagttgctttccgtccacgaaggtgcggatgaagtcttccgtccactccaaagcatagacatgaaactcggtctgtgcggtaggcaggaatgtctcgccggtcttttgcgtaccgatggagtggtggtaggctttacaatggatcgctgaggacacgtagttcgcattatagcctacttcctccatgatatcaatttctccgtcgtccggccagaccgtatagttcttcggcatcatccagaaggcgggccatgttccttttcccttgggcagtttcagacgggcttcaaaataaccgtatttccagctttctttggtgttcatacggatggaatagaccgtttcgcctatcttcttggcgataatgctgaggatgccgtcttttatggcagcgagttgttcgttgccttgattgccggctacataatgctgcaattcattatttccccatccgtttcctcctgtttcataataccattggtcgagatcgggttgagttcctttgttgaactcttcgttccacaccagtctgtatccttcgggcacggtaatgtccggatcggccgacggttccggtcgggctgcctgtgtcacagggatggaagtgcgtgcggctccggctttcaccactacctttccctcgcgggactggtaggtggtgtttgctttaaccgtgacttcaactgttccctggctgccgttatcagttatcttgcaactgatccaatctttgcaggcgtcgtcgctgaaagcggtccactccagtcccgagtttattgtggcgctggtgacgagaccttcgtgagtggctgaaagctgggcgggcgatacgtcgattatggcaacttctgtttcttcattgtcactgccacaggacagaacgcttaataaacagacgaagattgaaagtattgtcattggtttcatgcttttgtttgatcaatctttatgcttttgcaaaatgatgtctttgattattacttccgtattggcaggattgcctccgaagtcaaacaccagtttcgcctgggtgatgtctactcccttggcattgataactttggcggttacatcttctcccgcagtgagttttacatcttctagcaggaaaacaaagatattgtcattatctccgcctcctacctgaacgagtttgatggtggcggaactgatgtcgttagatgcgttcagtatcacacggaagtcatagttctcctctgccgaggcggtaagtgcgtcactgatgaaagtaacttggttctgccacttttcattggttgccgtggggaagttgagtgtgtacgttgccccgtcgatattgagtgccgggttggcaatcggattccaaccgggagcataataaaattcattggtgaatgtaacgctgtgccacaggttgtcttcactgtctaccgcactccatgtcggttccggagtctcttcttgttcgggtactatggttccgtcatcgttggcgtgatctttcagtacgatgctttctattgtcatcactgttcctgctgcattgcctccaaagtcgaagacgaggttcaggttggcgatgtcaagccccggcatattgcttttccagaaacagaccggctcgttggcaaccagtggcgttttgccttcgaaatagtagattttatcttctgtggcatcaaccagcttcaccgtcacattcggatggtcgattgtagaagtcaggatgacggagaaatcgtaattctttccggcatcggttgcgatgttcgtctttatcggcatttgtgcctgccaggtctcactggttgcttcgggcagtgttactgtgtatgtaccgttaaccagtgagtaggccgggtccgcaatctgactccatcccggtgcataccagaatgttggttcactgattgtggcagtccgccatatattgaaattgctttctgggtcgaagccaccgaagcccgtcatgatggttttgtcgatatggaagtttcgggtgattgctctgtcgcttactccattcgagttggctattttcacttctacactgtaatcaccggccttgcggtaatatttcgtcatgttgaatgaagaagaatagtttttgccgtcaataatccatatcggcattactcccttttgtccctgaaaagagaaagtcacataattggtttcctgattcacgtcgatgcggatacagtcttcgtagtccgataccaccggaatgccggcttcgttgggtgatgtgaagctttcgggcgagcaggccgtgatgttaagaataagggtgagcatcagcaatgctccgctgatttgtttatatatttttttcataattcctctttttaagtacattaataattgttctgaactaaggtacctttggctgcgtcgatttctttctgtgggataggtagatatttcttgcttgacgaccagctgtttgtacgataaccatacgcatcgggaaccagtacactggcagctttgcctgtacggattaaatcccagtaacgtttgccttcgcccacgaattcaagatgacgttcttcgatgatgttgtcgagtgtaggttctatttcggttaccagtccggcacgtttgtgcacgaggttcagatacttcttggcatcaccctgaccggcgccgcgtgtgatcagttcggcagcattgagcagtgtttccgagtaacggtaaatgcgtagattgttgttccagttcagctccgaacttgacttctggtctttgttgttgccggtgatggcagcatatttttcaaggaagaagccggtgtcctgatagcgtgtggtgtatgacagtttatcgcctgggtgttccgcattgtgagcgtcaagcacggcttgtgcattccagcaagtggcgttgcggcgggtgtcgttattggaatagcgctcgtaggtttctttacgtaccgggcagaatccccagccacggtcgtgattgtctgttccattaggccagatatacggactgatgagtgtcggcagggcagttcctccggcaacgaggggacttccccagtcgcgtacggcattatcgtctttgtaattgatctcgaagatggattcgatactccattcaccggtttccttgaaaatatcggtgtagtccggcatcaggtcatattgagggctgctgatgatttcttccatgtattttaaagcggtggaatagcgtgaatcgtcattctgatacatcacgatttcggcataaagcatatataccattgctaaggttacacgaccatagttttcggaatcttctctcatcgggagtacgttgagctgaattacttcttcaagactggtgaccatcttttcatatagctggtcggcagtcagttgctttgcaacatacggagcggtcaggttcttgtcgaaataaggaacattgccccagaatttccacacccagttgtagtagaatacgcgcagggcgatgacctgagcttcgtaataggcgcgattggcgtcggttacatcggttgcccagtccagataggttattacgtcgttgcaacgcttcacaccgctatatgcacatttccacagaccgtagatcatattggtgggaatggcttcaaagttcatcatcaagtgccacggctggttgtcggttttactgtcaccacccacccaaaggtcgtctgccatgatatcgctcatcagattgacaggattatattcgtcgaatgcccagtccggccagtgcaaagggtcataagcagctactacggcttcttgaatgtgttcgtcagtggtgaagtaagtgtctattgtttcgtccgtaggagatgaaacttccagaaaggagtcagcgcatccggtggttagaagaacggatgccatcaggcatactgctatgtatttatattttttcataacgttttatgtttttagaatgaaaggatcagaaagaaagacttgcgccgattgtccatactctggcttgcggatatacaccgtagtcaatgccaagtgaagttccgccggaagagatttcggggtcgaagccgtgatatttggtgaaagtaaacaggttctcggctgccacgtagaagcgtagtgaagagatgaatactttctgggtcagtgcggcaggcagagtatatcccaactggatattcttcaggcgcagatagctgccatcgtagacgtaaaggtcggatgattgccagtttacgttgtcaccttgtacgaagcgggggatacggttggaggtaccttcacctgtccagcggttcagcatccatgagggcaggttgctggtggcgatgtccgtacggcgggttgcgtcgtagatatcgtttccggcagtgccttgccacatcatgttcaggtcgaagtttttccagctcacacccagattgaagccgaatgtccagtcgggcatacctttacctatatctgtacggtcgttcgcatcaatgattccgttgccgtctacatctacgaagcggacatcgcccggtacggctgtcggttgcagtaattctcccttgtcgtttttgtaagcctttacttcgtctgtgttctggaagataccagctgtcttatatccgtagaagaaagggaaaggtttgccgttttcggcgcggctgatatcacccgttccctggaaggagtctaggttttcccaaccggattcgttaccatattctatcagtttgttctttaggtaactggcgttggcgctgacacggaagttccagtcgctgacgcggaacttataggctgcttccagttcgataccgctgttttccattttacccacattaccgataggtttagcttcacctacatagaaagggatattcatttccatcagcatgccgttggttttcttcttgtaatagtctgctgtaaaggtcagggcattgttgaagaaaccaaagtccaaaccaaagtcgagttgttcggactcttcccatttcaggtcgggattggccagcccgctggctttcacgccgttgattacgttttcggatgaaccgaagatagcattattgccgggagaagtcaatacggtatatttgaagttaccgatattttcgttaccattcttaccccatgaaaggcggattttggtggtagtcagccagttcgggcgtttgttcatgaacttttcgttggtgaggttccatcccaaagagaaggaggggaatacggcatagtgattgttggggccgaagcgggaagaaccgtcacggcgtacggtcacctgcaacatatagcgttcgtcataattgtagcttgcacgtgcgaagattgaagccagtgtggcatctaccgaaggagcacctgcggcgtcacgatctgcattggctgccagtccggtacttgcgtcgatataaggacggctgtaattggtgatgttattgcgtgaaccgtacagataggagcctgaactctttttggcggattgacccagcaatacggagaaagagtgcttgtcgatgctcttgtcatacatcagcacgttttccagctgccatacggttccgtcttcttttcttgaataagcggaagactgggtagaagattcaccgcttcgcagataataaagaggtctgtaactatcgtatccccaaaaagagaggtcggcaccataggaagtcttgaatttcaggttgtcccataattgcaattctgcagagaagttagcgacgaatttatgactccagtgtttgtcgcccggcaaagaaagtttggcaatcgggttggacatttcaccgaattcgcccgggatgctgaaaagttttccgttgcgtgggtcatatacaggcgtgtactctgccgttgtaccgtatttgtcgaactgggcttttatcgcttcttctgtttcgtcgtacacgttcagtatgggagacagggcgagtgccgatcccaatggtgtgccccaggtagagttatcatcaaaattcgtacttttaatgcgggcataagagaggttggaagtcaccttcaggctgtttagccagttacgttctttcgattcgtcgaagagggtgtactgtgtattgctgcgcagtgtcagacgttcgtagttggaacggtcgaagttacctcccacgataccgtcttgtgtgtagaagcccagagaaaagaggtaatttactttttcgctcgcaccactcacactcacttggtggttcatcatcggagcattgttgttaaatacttcgtcttgccaattagtgccttgaccgtaagagtatgggtcactgaattttggggcgatacctgcattgatcgcaccttcattgatcatgagtgcgtattccgaagcattcagtacgtcccgttttttccaggcactctgccagccgtacgaaaagtcgtaagttactttcgttttgccgatcttgccggttttggtggtaacaaggataacaccgttggcggcacgtgcaccgtagacagctccggaagcggcatctttcaatacttcgatagaagcgatatcattcggattcaggtagtccagcccaccttcaagcggcataccgtctacaatgtaaagaggatcggcggctccgttctcggtacgaatggtacctaccccacgtacgcggatttgtgcagcggcacccggctgaccggaagaggatgtaacggtaacaccggaagctaaacctttcagagcattgtccatacgtaccggggctgtggaggccagatcatcagcggatactttggcgatagaggccgtcacaacgcttttcttctggacgccataacccactactaccacttcgtccaatgtctcggagtcttcctgtaggacaattttaatatctttatgcccttttaccgcaatttcctgtgacttgaatcctatataagagatggaaagaatagcgtcggcgggtgccgataatgtgaaagtaccgttgaaatcggtgattgtacctgtggaagtattccctttcacaaccacatttactccgggcagaggttcgttgtccgtaccacttaccaccgtaccttttatctgtatattctgtgcatatacagcagctaaggtgaagcttaatagaaataaaactgataataactttttcatgagttttactaaattaagattaactatactctttttatgttcgcaaccgaacgatgcaaacataaggctaaatggtatacggcttgataaattatgttattcataaatacgtcaaaccgggaaaaaaaatacgctatcaatacgtcatattatagtaacgtattgataactagataataaagggtacgtttgtttgatacgtcacaacaacagattcagaaaaataatcagtttccgaatctgtcggggcgactatttgtgtcagaggtagttgcttaagtaatctgtcaaactgtcttcccgttccagaccgaacttcttgcgcagacgataccggatcgtctctaccccccggacggagatattcagaagcggtgctatctctttggtagaaaggttcattttcagataggcgcacatcatgcgttcattgttggagagatcggggtgtttggcatgaagccttttcatgaaattattatggatcaggtcgaactggtcttcgattcgctttaatacctcgtcgctctggatattggaatcaattttgctgttgatcagtatgagctgctgtttgctttcacgggagccttcgcctttcaacatggcggatactttggctatttctgacttaatctcggtcagcatctcgttcttgcgtacgaagtttatcatcaggttggccatttcctgacttttgtgttgcaggtcatgctccagcttttctttttccagttgcatgatctgtttttcgttccgggctttttcttcttcgtattccttttccatctcaaacagttctttgtctttttctacaatggcttgttgctttttacgcttcacacgcatatcgtcccatcgataaacaccccacataccgaagagagccagaacgatgtagcagatgtaagccattacgctgcgataccatggcgggagtatgcggaatgatatttcatcggaagaggaagtgccgtcggggaaaagggctttgatttcaaatatatattcgccttcgggcagattactgtattccttggtgcgtgcaacggtgaagtccgaccattctcctttgttcagacgataacgaaaatgggtgtcgtcactcagaattaaagaagaaagctcatattcgaaacggatggaattcagtgcatagtcgatagacagtgcaggttttcgctttaggaaattggccgtatataccagtgagtctttgggataagacagatacatattctttatatataaggagtgactgcggtcttgttgctctctgacagcaggaatgctgaaaagggcgaaaccgtcttcgttaggaataaccagcaatgaatcggataggggaatgatggcctcgaagttgagcaccgactctatcttgggttgtcggataggattgatgctggtattagcccctttcttataagttcccagattggcgatacatatttcataagggcttaagctgatgagatggtcattatattccaacagacgtgaataggttgccgtaccgttcagaagattgttcatatccgggtagggttccatgatatctttatggatgttgtgtttatagatgccggacggtgtggcaaagtagatacgacctttaatttttgcggggtatatatgattttttgaaggaaagccgtctttggtatcataatctttcacgctggtgacctttgtcagattttcggataacttgatatgggtaatatggtctgtgttatacatccagatagttcttgcatcctcttgttcgaagagacggctggaatcgttcaatccttcgattttgcagacgacacgccactctccatctgttttttccactagataaatgccgttgtatacaccaatgtacatcaggcctttacgattcatgacctgctgacagcaccatgcgccggtgatgtccgtcactcgtttcattccgttgtcctgaatcaggaaaattccccggtcgtgcaggcagaaaagttcgtctcctatatggcagaggttccagacctggccgcttgactgcggaacgggacggatatcgggcaggttaccgttcgattgcaccggataggaagtgtagtataaaccacggttagtacctaaataaagagaaccgtcttttactgctgccgtatatcccgctccataagagtaggggtatgaatatagattcgtaaaaggagaagtgaggcagacatagtcaatgccactatccagtcctgcccaaagattgccgaaagtatcaaaagcaacggaaagaactgtgttattgtgaagtccgttattctcattgaaatatttgagcttcatggttttgcagtcaatcagtatcaggcctttatgaatagtacccaatgcaatctggtcattttttgccgccacgcagaatacttcattttcgcgcatgaagtcttcggcaccggtaacgaatggttccattgtgcgtccgtcacagtaaaacaatccattataggcggttaccacaagtacgccacttttataaggtataatgccacgaatgcgttttgatgccaggtcttccgcaccctgtaacgggaaaggggtattgcctaccagtacccatactccccggtcggttccgatatacaagatcccctttatcatgctcgaacagtcaatcttggcatccgtctcgatggcggtatacttaccgttcagatatttcactatgcggctgtctccctgaaagtacatgatattatctgcttcgtgaatgttccatacattgccaagatagcggcaatcatctttcagcgtatccgacatacagtaatattttaaactgccgtccctgcccggttcataatagccgaactcattgattcctcctgcataaatccggttatgagcggtagataccaaaacagaacgcacatctgaagtattgttcagcgggaaaacgttccacgcattgccgtcgaattgtaacataccgttcttattggcaaaaaatacccatttatcatcgtaaggtgctatcttccatgtctgagcgcctttgccatagagattcttatcgaagttgataatgaaactgttccaattggcgaaggtttcaataaaaggtaaaaaggaaaataagagaaacagattgcgtatcaggtgttttttcatatgtattaatcattttattctacaaaaataatgtttattttcaatgtagcctcttaatgctgatttttatgtgccgatttttaataatccgttcaacaatgtttgggtgaaatctgttgcttttcattatctttgtctttcataaaaacaataattttaaaaagtatgagtatcgaattaggaaaattcaaccaactcgaagtggtaaaggaagtcgatttcggtttgtatctcgacggaggagatgaaggtgaaatcctgctgcccacccgttatgtacccgaagactgtaaggtaggggatatgttgaatgtatttctttatctggatattgacgaaagactgattgccacgacactgactccgttggtgcaggtagggcagttcgcctgtctcgaagtctcttgggtgaaccagttcggggcattcctcaactggggattgatgaaagacttatttgtacctttcagtgagcagaagatgaaaatgcaggtgggaagatcctacgtggtccatgctcatgtggatgaggaaagttatcgtattgtagcttcggcgaaggtagaacgctacctgtcgaaagatatgcccgattatgctccgggtgcggaagtggatattctgatctggcagaagacggacttgggtttcaaagcgattatagacaataagtatagcggattgctgtatgaaaatgaaatattccgtgcattggagaccggtatgcagatgaaggcgtttgtgaaacaggtacgcgaagatggtaaggtggacctgatacttcagaaaccgggatttgagaaagtcgatgatttctcgaagacactgttggagtatattcgggaacatggcggacggatcaatctgaacgataaaagtcctgcggaagatatttacgatacctttggtgtcagcaagaaaacttttaagaaaggtgtaggtgacttgtataagaaacgattgatttctttgcatgagaacggcatcactttggcagaatcctaaacagaatagggaaatccctatgcaggaatagagagaatcattggggtggggagttttctcaccctatttttgtgatatcagttaaagataataattttaaaaacagataagctatgcgtaagataataataagtttctgtattttgctcgctgccctttctttaaaagcgcagcctgtcagcggaatccggattgatggcggagatactccgattcttgtttattttggcggaaggcagatgtgttatcctactactacttgtttcgttgccaatctgaaaccgggaaattataccattgaagtgtacgcttcccgcccgactcgcccgggagaacgtgtatggaaaggagaacggttgtataatgaccgcgtttactttaacggaaacgaagtaaaagatatcattgtagaagaacgtggagatatccgtccgggcagacccggaagaccgggaaacggtcagggtggacaccgtccggactataaccgctacgacagagtgatgaatgaccaacttttcaagaagttctttgatagtgtgaagaatgagccttttgaaaaagatcgtatggggttgattacaactgcattggcgaactctgattttacatcggagcagtgtcttcaactggtgaagttctatacctttgataatgaacggctgaagattatgaaaatgatgtatcccaatattgtagataaagaggctttctttacagtgatcggtactcttacattctccagtaacaagaccaaaatgaacgatttcatcaaggaatacgaaggacgctgatcatacattagttcactaaaaacgatacggttatgaaaaatatacatataatcctgtttttcacgttgtgggtaatactcggtagctgttctacttattacgtatccaacaagcaagtgatggaggttcagcagggaatgtcccggcagaatgtagaaaaaatcttgggtaaaccggattacagacgttttgacggaggtggcgaggaatgggagtaccaccggatttcttcagtgctttacggcaactcgatcaagattattgtatattttgcagatggaagagttacgggtatggatacctttaatggtgatgaaatacttcttccgccgcctccggttgtgatgtctccttccgttgttgtaaccaatacggatccggttcgtccgccacgctatgaagaaagtccccgtcgcagaacacttatgatgcgtgatgagtttgatcgttttcttagtgatttccggatggtgatcatgtctgatgagcagattaaatatatagatgacgttttgttggattgcaattttacttctgcccagtgcggaaagatcattgatcagataagtggttcggatgcccagatgactgtgatgaaacgtatgtatccgcaaattgtggataaagaaaattttgcttcggtcgtcaataagctcttttcgtcttttgaccgtgacaagatgaaggaatatatccaggcttaccacggtgaccaacgaccgggagacgtaggatatgtacggcccagagctatgagttcagccgattttgaccgtttcttcaatgagtatagaggtaaatcttttgagtctgaccgtaccagaatgctggatgaagttgtacctccttcgggattcacttgtgcccaatgccgtaaattggtggatatgtgtacttttcagacagataaaaagaatatgataaagaaactttatccgaaaatcgcagataagaagaacttctccatactgacggatgttttcacttttgagatggacaaaagagagatgagggagtttgcggaatcttacgatagcggacgtaactaaaaaagaatgaaaccatgaaaagaattctatttatattgttagtcgtgactgccagtaccactgtaatggcgggaatgagtaccagcaaggtacgtaaggagacacgtttccttactgataagatggcatacgaactggacctgaataatccccaatataatgacgtgtatgagattaactatgatttcatttattcgcttcgtaatattatggattatgtagtacggggtgatgagtgggcattggatgattactatgaagcgctggatattcgcaacgatgatcttcgttgggtgttgagcgatgcgcaataccgcagattcctgggagctgagtatttctatcgtcccatttatgtcaccggaggaagatggagtttccggatttatatcaattatccgaatcgtagtttattctattttggtgtaccttatcattatcggacttactgtggtgcacattatcgtccgcatattcatcatgtgagttattatcggggaagatataataatcttgtgcactatcctacgccatatcgggtaagagatcagcgggtattccattcttatcgtcgttcagacttcggttctgtacgtttccgtccgaacacttccgttcgtccgcataatgcacctacccgaccgggtacttcgggacgtccgggaacaacgtcacggcctaatacatcaggacgtccgggaaatacttcccgtcctcgtcctgaaacggaccatagaccgtccacttcaggcagaccatctacatcgggcaggccgtccacttccggaagaccttccaactctgaaagaccttcggtcaatgaacgaccgtctattccaagcagaccgtccactccgggcagaaatgataaaccgaacaaggaagtaactccgggcagaggccacaacagaggtgaaggagatcgtcattcaggaagtcgtccgggaacgagtacaagtactccgaattctaatcgtcgtccggaaacgaattcagggtcttcgaattccagtcgccgtccgacaagtagtggtacgagcacaaaccgtggcagcagctccggtaggaacagcaattccggcagtagttccagcagagggaatgtatccggcagatcaacagaaagaagctcatcttcagaaagttcgagaagcaacagcaaccgaggttcttcttcccgttcttcagaaagaggaagcagctcaagaagataaaacctattcctttattaataaattattgctcctcagcggtaggagaactggactccggcgtttcgccgactagactattcagggcgtcgcccgtaacttggatatcggggcggatactatccgcctcgatttcacttattaaccctttcttggcgaggcgtccggcaatcagcttataatagccttccatattctcttttaaccgtccgttttccgcaaaggaactgcggaagtgtttaggcttcgggataatagaagctagaaaaatactttcttcggtcgtgagttgcgaagggcgtttgccgaaataataggcagaggcttcctgaataccataaaccagcggtccccattcggctatgttcagataaacttcatacatacgttctttagaagtcagcctttctgtctctatcagccatacgatgagtgcttcttccaatttgcgggcaaagttcttgttccggttgagaaatacgttttttaccagctgcatggtaattgtgctgcctcctctggcgaaacgttcgacttgcaggtcataaatcaaagcttcacgcattgcatcaggcaaaaagcccttgtggtagaaaaaagctccgtcctcactttgcatgacagacatccgcagcaatggagaaatgctgtccaaaggagtaaaatgttcccatgaaggtccgacaggaaatgttttgaccggtattccgttttcataggcggtatagacaaactcttcactcatttttgaaagagatgttgcaccatattctattatccgaaaatctttttctttcaattcggactcaaacttaaggctgtctagtcgggcaaaatcgatatctaacagaaaatgataagccagctcaccacttgtttttataccttccagattgctgaataagcctttgggcaaagaactgaatagttcgtcggccggaaaccatgatttatctgtggcagcagtgaagtgccattgattttcattcttttctgcccgcagatagggatgaaatagtatttggttgaataataccgtcgtcgtactgtccagttccagcgtttgcttgccgatattcatctgatacgtgagttgtccgcgatccagatggatcacttcgggagaaagtgctttgtgaaatacatcaagtccgcttactttcgccttaccgtcaagttgcagttggttttcggtacgattttttttagtcatactataatataaggtatcgaaagtaacttctgctccaaaacggcggttgatatacggtattgaaactttctttttctctgtggcaaaaagttctgcctgcagggtatgtacctttctgttcagttctcctgctgcttcccattgttgagtcagtgtatcttcttttattttgatagtggactgaaagcgattgttttcgattgtaaaggtggggatattgaccgttacgaaattgctgtctttccgttcggttatattaagttgagtcagttgaccgttttcggggaggaaaccatatattaagtttaatattcggttgatgcgatgggcgtaattggtttctatgactgcctctgtggttgcttccgggcggtgtccggagaatagaaaatcatagttggctacactgtcccgtttgataaaagcgattgccagtccattcatgtggacgttgcggacttcaatatttcctttcagcagtttccagaaattcagcctgacgttgacggattgtagtgtaagaagggtatcccgttgggcgggaacgatggaaagcccttgcagggtaacttcgttacatcccttcatctgtagattctgataatgaatttgcagtccgtatgtttgttcaatatgagtcgtgcgcttgttagttatgctttgcagaagcatattgcggctcaaatagatactgataaggcagataaacaagcctcctccgattgatagaagaagaatactttttttgctgttctttttcatcttttgcctttaataagttattggctgcaaaggtagataatattctgttcaacaagatataagcagtctttttttattagtgtgtccgcttatgagcgtacaactgttcattttcgtacatctcattttttattctttgtgttgattattagctgtttatcgttttggcataccccttgcatttatagagtcgaaggcgggcaacaaaaaagatgaaaaaaagttcagatagttgcaaccattccatatagacgttccgtctaataaacagaagaacaaaaaaagaaagttgaactaataaaaaatatacaattatgaaaactacagtattattcagaatgatggttttagtggcaatggtagttgccggtatcgctaatacagagttgaaagcacaggacaataacttcattactaatgaagagaaagtagatgatcttgttgtttcgaaggtgatttacagactggatggttctctctatcgtcacatgaaatatgattttacttatgatgatcaaaagagagtagcagctaaagaagctttcaagtgggattcatccactgaaaaatggattccgtatttcaagatcgattatacttattcttctaatgaaatcacattggtatatgcacgttggaataattctcacagagcttatgatgattctgtagaaaagagtgtttatgaactgaatgatgctaatatgccgatcgcatatatgaactacaagtggaatgactataaatggattgaagaatcagccggcaactgggctatgaatatacagactccggtaacagatgaagcagacttgctgcttgccggaagataacaataccggggattgtgaaattctctttctctcttaaggttttaacaaacgaaaacggtggattacccaaacgagggaatccgccgtttttattgtatctgtctgaaagcgatgctgtttactaggttattctatttaatgagcggcagatattctccatatccttcttctttcattttttctttcgggataaaacgcagcgaagcactattgatacaataccgcaatccgcctttgtcctttggtccgtctgtaaatacatgtcctaaatgcgcatctcctgtcttgctgcgtacttctgtccgtatcattccgtgagtagtatctttcttctctgcgatcagctctttctgaatcggtttggaaaaactgggccatccacaaccggaatcaaatttgtctgtggaaacaaacaacggttctccggtagtgatatctacataaatgccggggcggtgttcattccagaactcattatggaaagccggctctgtggcatttttctgagtcactgcatactgttcggcagataatttcttacggagagtggcatcatccggtttttgataagttggagccttgggagcattcgcttttcgtgccatttcaaataaagccggattgatatggcaatatccgcccggattcttatccagataatcctggtgatagacttctgccggataaaagtttgtcaacggctccacttcaacggcaatcggtttgttgtattgagtggctaatgcctggatcgcctgattgatggtggggagatcggctttattgatataatatataccggtcctgtactgtgtacctcgatcatttccctgtcggttgaggctggtcgggtcgattgtctgaaaatagaggttgagcaataaactcagatttacttcttccggatcataaacaaccttcactgtttcggcagcatttgtcttgcccgaacacacctgttcataactgggattggcaacggtgctgttggcgtatcccacctgagtactttctactcctctgatttgtttcaggaagtgttcggttccccagaaacatcctcctgcaaaataaatttccgcttgacttttcattggtttggcaactcctaaaaatatattactaattgttagaatcattgcgatgattaaatgtttcataactgttggttctttctatagtaacggatgaaccggtggatatgttttagaaatctcttacataaataacaagtgcttttgggggagtttgaaaacatgagtaaagccttaaaaatagaaaagtattctgtttttaaggctttagataaacagctgggaatctgtcctattctataatttctcctttatagaaatccagtattttagtgcggaacagataatcgtatttggcttgcagtttatccgacagtgctttggtcaggtttagtttcgcttcattgtattctacaaaggtagctttaccgttattgaacttttcgctcatcaaccggaaagactcttcgttggctttcactgcaacttcgctggagttatatttactttctgcagctaccgcattataccaggcttgctggatttctttataaagaactttcttggtgttgtccagttgcaaagcaaggtttgactgttgtaggcgggcagtgcgtacccggttacgagtgctaaaacggttgaagatcggaacactcaggttgaaggaaacggatttgctcaggttgttctttaattgacgggcgaaaccggattccgattcaccgttgagtgtatagtagctgcttcccaatcctgcactgaaagaaagctggggatagaattcactttgagcgatacgaatacttcttaagctaccctgtaagcgatattctgctgccttaatgccaggcttgtaggcaatcgcctggatataaatgtcatccggagctgttagaggttcaaatttcagttcttcttttggattctcgagaacgaaaccttccggtgtaggcagttctaataactggctgagacttaatagtgacaatttatatgtattgtccgcctgtacggctgtcatatcatcctgtgccacacgtgcttgtgcctcagctacttccgccggtgaagctttaccgacatcatacagtcccttaatacgtttcagctgatctttgcttaactcaacctgattttgtgctaccttgttcaattccagattgaaaagcacttgcagataggcagaggtaacattgattgcaatatcctctttggctttattcaggtcctcgatagccgcctgtaaattgagcttggcaagcgaatattgattggataattgtaagcctgtgaagagaggtacattagtactcaagttcactcccgtactggaactgttagtatcactatatgagttatctttcggagaagctgtacgtccccagctccacccctggctgacaccaccgtttaagttcggcagacgtgcccatttggcggtgtttacactaatcttattttgttcggcttcattggctgtctggcggatgtcgatgttatgctcgatggcatagtcgatgcattgccgtaaagtccatgtctgcggagtggtatcctgtgcttgaacagaaccgatgccggttccgctcaacaggatgattgctatcattttattgattactttcattggatgtcagttatttatcttttttctcagcaccgcgtaacttggtctgagcggttacacctttttttatttcaatcttgataccgtcactcattccggtagtcacctgtgtacgttcaaatttctgttgtggtacagagtccgtcatgatatacacaaacgtagagtcaccgctgaactcaatcgtactttcgggtactgccagtactttgctggcacgctggagcacaatctctgcattggcggaatagccggaacgaatctgcacggtatccggaacagtgatggcagccttgatttcaaattgattggctccgttggtttctactcctttcggtgaaatatattcgagaatagcatcaaaagtcagattctgtaaagctccgatcgtcagtttaatcggcattccttcatggatgcgtcctacttcggtttcgtcaatattacccctgaaaatcaggtcattcatatttgccaccgtagcaatggtggtaccatcgttgaatgtattactcatgattacggagttaccggctttcactggtacgtccagaattaatccgtcaatagtagagcggatcatggtgctactgaatgaagcactgtttttagtgattccttcttttataatttccagattatctttggcagtctgattctcttcccgtgcctgctttaccgctacttctcctttttcgtaatcttcacgactgataagctgatcttcatataacttcttgatacgggtaaagtctgtttcgacctgctttgcattgatctctgccaggcggacacgactttctgcggagttcagttgtccgagttcgggaattactttgactttcgcgatcacttcccctttttttacgctctgtcccgcttctttgaatacctcgtctacaataccggaaatctgaggcttgattaaaatttcatctctcggctctacctttccggtggctactgtagtcttttcaaggtccgtgacttctgctgccagtgtttcatatacgatcactttaggcttggatttctgataaagaaatacgaacgttccgacaaggattatggcaataattaccaataatgtgattttcagatactttttcatcttgaatatatatgtttaatttttaattcttcatttaactctcaactctcccttctcaactctccacttctactcatctctgatcgcttcaatcggtttgatagccatcgcacggtaagcaggtgccagtcctgccaacatacctaatgcgatcagcagggcacaggttccgactgctaatccgaagctgacctggaaatgagcatctcctccgttggagttcgctcccatctcaaccagttgcagcaccatgacagcgaaagaaattccgaacatgccggcgatggttgtcaagaccatgctttcagataagatttgctgcaggatgtctttggggcgtgcaccgatggcacggcgtatgccgatttctgtagtgcgttctttcactgtcaccatcatgatattcgatacaccaatggcgcctgccagcaaggtacccaaacctaccatccagatcagaatatggataccggtgaataagttgtctaccatggaaaacatagcctcagcgttcagatacataagcgcctgcttgtcattaggagcaatatagtgtgctgccttgatgatttcttccatttggggttgtacatcggaaacctttacgccccgtttgacggtgaagcagattacatcaatttgtccgcctagattataagtctgctgcatggtggtgaatggaagggtaacagcctcggaggcacggccctgtatgttcatatctccttcggaagaagacatgccgatgacttgatagtagatgccgtctacccgtacatatttgccacacgggtcttctcccggtttgaacaggctttcgtaaacacgcttgccaataacgcagaccttacgcgcttcacggatatctacgtcgttgataaaacgcccgtatgccatttcttgtgattcgatatggagatagtcgggatataatcctttcacactacaatcgtatttcttgtctccataaatagcgttggatccccaacgggcaacggaaggggtgatgacttccacatcctttacctgcgagcggaggcgttcgatgtcgatggcttccagatcccaccagcgtcctttacgaaatcctttgtaggcttctcccgttttttgggcggcaaggaagccggagttggtggcaaatccctcaaagttcttttgcatcatatcctgcaatccctgtccgccgccgataagcgccacgagcatgaagattccccagaatacgccgaatgccgtcagcaggcttctcgttttatttcttgtgatggtgatgaggatttcctcacaagtatctatgtctattctcataatctttaatcggctctaagtgcttcgatcggtcggatgctgactgctttgcgggcagggaacaatccggctaatgttccggctattactaatgtgagtgtagcttggatggcgattcctatgtcgaccgttggattcaggaataccgtttcggaccatataccgttgtccatagtctggtttccgaaggcattgttcatccattcggtggctccgatacctgcaaccatacctatatatccgaatatggtggtaatcgtgacgctctctacgataatcagccaaaggatagaaagtggtttggctccgagcgctttgcggatgccaaattctcgggtacgctctttaacggtaatcagcataatgttcgaaactccgacaattccgcttaataaggtgaaaatgccaatcacccaaatggcaatacgaagcatcgccgatccttgctgttgctgcagataattggtgaaacggttccatatccagatggcgctatgatcggtcgggtcaaaacgctggttggcgccgatcactttacggtagtgggcttcgaattcctcgttagactctattgtttccaaattcttggtggtcatgatgaggttattcagcttgtctcctttattataaatcgtttgcagggttgtgaacggaagataagcatcgctgtctccgctgtcacctttgtcattgtacagtcctactacctgatagacaacattgcccgcattcacgaattgtccgatggggtcagtatgtgttttgtcgaacaggatttcggcagtctttttgtggagtacaattactttccgtcgttctttaatgtcgatttcgttaatgaaacgtcccttgaaaagctttactacttccacttccgtatggttgggatatactccagaaagattcaggttgacatattccggtccgaagctaaggttcacacctccctgatatacggttgctccggccttgatgacatgatccggaaaattcttattggtcgtattcaagtctttgttatccagtcgtatccgccttccttccttcagaccgtcgtatgatttactggtccatcccggaaaaattttgatggagttcatggcccgttccgaagccgactgttcgaatgcgtgaatcagcccgttgccggcacccagcaggacgatgagcataaatattccccatgcgacggcaaatccggtgagaaaagtcctcaacttattgcgtttgatggtactatatatttcttgccaaatatcaatcatattttaagtaataagttataagtaataggtaataagtattaggtattaagtataaagtattaggctgcgttgtgaccgcatggaattaatacttaatacttattacctattacttatttcataattccgttttggccgaatggagaggcgtcgtggtcgaggttctcttcaatccgttcgataataccatctttgatatggatgatcttgtccgtttggttggcaacaccactttcgtgggttacgacgacgatggtcattcccattcgatgcaagtctttcaatatctgcattacttctacggaagttttgctgtccagagcacctgtcggttcgtcggcaaggatgatctgcggctgggtgattaatgcgcgggcgatggctacacgttgtttctgaccgccactcatttcatttggcatgtggtgtgcccactcctttagtcccagccggtcgagatattccagagcgagtgcatttcgctttttgcggcttacaccttgataaaataagggaagtgccacgttttctacggcatccttgaatgatatcaggttgaatgactggaagataaatccgatcatacggtttcgatactcggcggctttcgtttcgctcaagtctttgataagtacgttgttcagataataatccccggtatcgtagttatcgagtattcctaatatgtttagtaaagtagatttgcctgaacccgaagctcccatgatggaaacgaactcacctcgctgaatgtcgagattgatgcccttgagtacatggagaggtgctccgttgttgtaggtcttgttaatgtctgttagttttatcacaatttcccttattaagtttcttttttctttttatttttcactattagacgcatgaaagatacgaaaagttgcaaacagagtgaacttttttgaaaaaacattttgtagactcaatcttctttacgtaatttgtgtgcagtaaactttataattaactaacccttttaaataaagtatcatgaattcaaacatggagaaaccctacgtagtaggtattgacataggcggaacaaacaccgtctttgggattgtagacgcacgcggaactattattgccagtagctcgattaaaacagccggctatccgactgctgcagaatatgctgacgaagtatgcaaaaacttgcttccgttgatcattgctaatggtggtgtagataagatcagaggtatcggtgtcggtgctcctaatggtaactattataccggaactattgaatttgctccgaacttgccttggaaaggaattcttccgttggctgctatgtttgaagaaagactgggtattcctactgctttgaccaatgatgctaatgctgctgctatcggtgaaatgacttacggcgctgcccgtggtatgaaagattttattatgatcactctgggtacaggtgtaggtagcggtatcgttatcaacggtcagatggtttatggtcatgacggttttgccggagaattgggccacgtaattgcacgtcgtgacggtcgtgtttgtggttgcggtcgtaaaggctgtctggaaacttactgttcggctaccggtgtagctcgtacagctcgtgaattcctggctgctcgtactgatgcaagcttgcttcgtaatattcctgctgaaaacatcacttcaaaagatgtatatgatgcagctgtacaaggtgataaactggcacaggaaatcttcgaatttacaggtaatattttaggtgaggctttggcagacgctattgcattctccagccctgaagcaattgtattgttcggtggtttggctaagtcgggtgattatattatgaagccgattcagaaagcaatcgatgacaatatcctgaatatctacaaaggcaagactaaattgcttgtttccgaactgaaagattctgatgctgcggtactgggtgccagtgctttggcttgggaattgaaagatctgaaagaataatatcatttttttaataataaaggtaattggatccccgggggcgttgagtttccggggattttttgtatgtgttgtttctcaaaagttgtatctacaggaaataaaactggatattctgtagttttttgcgttatattgcgtctaatgtatagacgattaatcaaaataagatgaaaaaattggaaatagagtttgagcaagttgtgaagcaatataaaaatacaatttacactgtatgttttatgttctctaaagactcccgggaagtgaacgatctttttcaggacgtgttagttaatctttggaaaggtttcgatacattcaaaggagaaagtaatataggaacatggatatggcgtgtaagtctcaatacttgcatttcatcagacaggaaaaagaagattgtttctgtacctctgattatggggattgatctgtttgaagatagggacgaagatacaacacagataaagatgttgtataacagaattagtcgcctgaaacatttcgatagggcgatagtgctattatggcttgagaatttcagttatgaggaaattgcagctattgtaggaatttctgtgaagaatgtttccgttcgcttatttagaattaaagaagaattaaaaaaaaatgtctaacaactagaaaatatatgggtatggaagaatatatagatacgattgaacttaaacaaatgaaagaacagatagctattcttaacagcaagttggatgcggaggtcgttgttaatgagaagttgttacgtaaggttattaaaaataaggtgtcgggaatgaatcggtatgtagggattatgaattcattggcattattacttattccgttttatatttgggcatgtccttatttgggaatatcatggtggttttgtagtgtgttttgtttgttcctgtttatagcagttatgcacggctattttacgcataaacgattacgaacaaatgatttaatgagtgaggatttactggtggtagctcgaaagttgatggaaataaaatcccgttattccatttggcgtaaatttagtattccatttattattatacttttgtgttggctctttattgaactgcaattggcaggaaatagcaatattataattttttgtgttagtcttattttttcatttagggagggatataaacagtatcacatgatgcagcgcaaattggatgaaattcagcaggagatagatgaaattatgaaagagtgatcatttcagaaagcaaaggttggaaaattattatcaggacattttatgcatttaggatttcaataaaacttcttcaactccaataactctatgaatatgcgatagattttgtttttaggattcttgatatgtttgtgaaaattctgtttgactattgttttgttcgttttgtcgatgatattttgtctttttgttcggtgatgtaattgtttgttggatgatatgatatttgtagactgttggggatatgagatgaaatagaaataaaatcccttggacatagataaaattgcaatgtatagcaagtaagatgaacttggttttaaaggaagcttccgttcctttaaaaccaacgcctcgttcctttaaaaccaaaaccactttttaatcctttgaaaacttgcatattgctttggttttatgcagaaaaacagttgtatattgcatatttataggtgattttatgcaataatttgtctgaaacacagatttttctctgtttattaataatgtaaatcttaaaaatgggacattgaattccgctttctctattgttgccaatcgaacaatatagacttttgcgatgatgacactatcctgatcacatactgtcagtatccggtaggtatggtaacactataccagtaggatggtgtcactatgttcaaacgctcgttatgacaaaagtatggaagagaaagacttgaaataaaaaagaggaaatcccgttaccggaacttcctcttttttatttcgaatctcagagttcagcttagttgttaactcttttttctttgattctagctttcttaccagtaagagcgcgcaggtaatacaatttagcgcgacgaactttacctaccttgttcacttcgatgctatcgatagccggtgattcgattgggaaaattctttctacacctacagtacctgacattttacgtacagtaaaacgtttcttgtctccgtgaccggcgattttgataacaacaccacggtacaactgtacacgttctttgttaccctcgatgatacgatatgctactgttacagtgtctcctgctttgaagctcgggtgctgtttaccggtagcaaatgcttcttctgcaattttaattaaatccattgttgctattattaaattgttttatcgttacaacgcaacataccaagtatctcttctcttgacagcgattgcgcgaaagcggtgcaaagtaacgaattatttatcagatagccaaatgttttggagaaaatgatcggctgtgagctggtatcgaatgtttttggggttacatcaaacaaatgtggcaatagatttgtatctttatgattgggaataggaaaaaaggcactgccggggaatgtggagaagggttcacttctcttttgcagcagcctttattgatcattttaaacagtaaaaaatggggaatttaatttcatttatgaagaaggtagccgacgggctacgggaaagtgggaattatgggaccgcccatatttacaggagtagcatgagtgcaatccttgcattcaatgaaagcgggaatctgcctttccgaaaagtgactccggagtttttgaaaagttttgaagcgtatctgcgtggaagaaattgtagctggaatacggtttctacttatatgcgtacgctgagagctgtgtacaatcgggcagtagaccgacgcattgcaccttatgtaccgcatcatttccggtatgtctatacggggacacgtgctgataaaaagcgtgcattggaaaaagaggatatggaacgtcttatgaaagatattccgaaacagctgcactcgggaaacagggaattgcagcgtgctcgtggttttttcatattaatgtttttgctgcgtggtatgcctttcgtcgatcttgcttatctgaaaaaacatgatatagacggaaatgtccttacttatcgtcggaggaaaacaggcagaatgctgactgtgactcttttgccggaagcggtgaaattgatcaaacagcatatgaataccgatcctgcttctccttatctcttttcgttgatttccagcaaggaaggaacggaggaagcatataaggaataccagttggcattgcgtaactttaattatcagctgatgattctgaaacaagtgctgggactgactacggatctgagttcatatacagcgcgtcacacatgggctacgatggcttattattgtgaggtgcaccccggtgtcatttcagaagcgatgggacattcatctatcactgtcacagagacctatctgaaacctttcaagaataagaaaattgatgaagcgaatgtaatggttttctcttcctttaggaagtctttctcggtaggtaattatttgaattaaagcctgttactttgtaggtaacggggagataatacgctgcaaagatgaacatattttggaaaacatgcaaacaaaaaagatattttttctgataaactactaaaaaaaggaaatacaccaaacaaaactgcggattttttgtgaagaacacaccatgctctcttattgttgcaaaagatttccctcccctctgctgctattctaaagcaggggttaaatatattttgatacttatgtttcttgtctaccctttagacgcttcttcagaagtagctacaggctgtttcccgttacctacaaagtaacgggcgaatattatttgaacttagtgtttaataatatattattaatgtaatttttaagtagttatgaagaaaaaatttattagagtgatgtttttcggagcattggcgctaaccacattttcatatgtaggttgtaaggactacgatgacgatatcgatcggttagagcagaagataaccgaaaatgccaacgctattgcggaaatcaacaagctgatcgaagggggatctgtgatcacaaaagttgagaacattaccggtggtgtggaagtaacattgagcaacggtaagagctttaccatcaaaaatggtgatgccggaaaagatggtactcaatggacaattggtgatgacggatactggtatcaggatggcaagaaaacagagttcaaggctaaaggtgataaaggtgatcaaggagaaccgggcactccgggcgagccgggaactccaggtactccgggtgaaccgggagaaccaggacagccgggtactccaggtaaagacggtgatacctatattccaggtgaagacggattctggtacaagaatgaagtgaagccggaaaacaagactgatatgacttgggttatcccaggagtcgtttctgttgcagatatgggagattactatattttcagtaatctgaagaatgaagctggtgaagcgacttctgctacagtttataaatactctgctacttttgtttcttctttagtacatgtaccttctaatattcataaagaattaggagatgtagtatttttgccggttattggttatgatgagaactctaaggaagcagctcctgtatatgaatataacagttctaataaggttgtagatgcgactttggttaatggatgggctacatttgagtacaaactgaatccggctaatgttaatcctaagtattacacaggagtaagttttgtcgaaaaaacagctacagtagcaactaaagctgttactgaaataggattacctattgctaaagttgttcctaacgaagatcgtggcaaattgatcgtaaaagctactgctggtgataatgcagagaatcagaatgcatttaagatgtttactgaatacaatgaggatggaactatggttagcagatataataatcctgttggcaaaccattctctgaagcagatgaatatggtgaagtaaaagaaaacggtctaggtaaggctaacatgcttgcttatgtagttaagaatacaaatgaacaattaggtgctgctgaaaatgttaatgtagtgtctgactatgttgctgcaaaacgtatggtagttgaacaacaagaaacaactattgctatgccgcttaagggaactgacagacctgcagtgattgatcaggaagctcaggttctgactgaattgactgcaatttataagttggcagatgtaacgaaagacggtaaagtagaccaagcattagtaaatgctaaggtggcagctatccagcctttgttgaaactgaaatatactgagtctttggatttgaatacggtactgaaagggattgctacaaaattccataccaatacagggtttaatgcaaaggacggtcaatatttgctgactgatctgggattcgaaaacgttacattcaaatatgaattgatgtcaaatcctttaggagaagttgatcagactttcagatatctgaaacttgatggaagtacaatctctgtgattaatcaacaggatgccgctattgaccgtgaacctgttctgaaagttcaaatgtacgtagatggcgtctttgtaatgactaagttgctgaaaataaagattacacaacacgaacagttgacagaagactttattaataaagatttgcttcctcagacgcttgcttgttcacccatctatggtggtggtttaatattggatcaggaagttcctttcaaacacgtggacaccgctggtgagttagattatctgtataaggtagatggtcttaagattgactttgaccaatacttcaataagctgaaaataagcaaagagaagtttgttgaatactatggcgcaaatcctgtagttgaggttaagaaagatggtgaagaattcactggttggagtttgacagctgatgatagcaagaatctgagaattgattattctaatgtttcaggaacggctactactttaaataactatatctacttcggattgaaaccggcattgcatgcaggtacttatgtaattaagttcaagtatgctacaaccaataaattggctgaatacggttcattcactattactactacgttggtagtgaaagatcctaagcatgtttgggtatataatccatctatgtggaatggtacagagaatatgctgggttatggtcaacctacttcaggagactacgatacaccgttcttgatgaaggctgtccttgaagatggattcaaagaacctgcaccttgttgtggtaactggacatttgctatagcagatgctacaattgaagctactgatgccaagatagttttagttggtggtaaacatgaattgcaaatcctgaagaaagaatggatggataagaagattcgtatcaaggtaacagaagagcttgcaataggtcgtacaattgacaactatgtatctgctggtgcagagtccaaagaatttgatattgtattccctaacccggtagcatatactccgatcaatgcgtctgcttggtatttggttgaccaagctcctacagcaacatgggataacggtgcttatctgccaatctatcgtttcattaagctgtatgatacacacagaggtgaaactaccaatgggctgatgtatgatggtagccaaaaagctccttgggctaagttgaatactgtagaaagtggaaaatctctgttcaagatgcatcaggttaaggtttcttatgagctctctgataagaataatgacattgtgaagagacatgcttctattgtgaagaatggtgagaaagaagttggtttgctgaaatgggaaaatactggtggtgcagctgttggttcagttgaccagccgattgtaatcaatgtaacaatagagaatacatggatgggtgatccggctcaaacaacgaagcaagttcacgaagtcactgtatatgtgaagaaagctgatactaagtatacgaagccaagtacaggattcttgggtacattggctgctcctgaaggattaggctcatacgctgatttgaactaacattaacttgtaaatagttttagaagggtatcttcataagagagggtacccttctttaataaatatcttatttaaagaaaagagatgagcatgaataaaaagaaattgtggatagcagcgttttctttgctatttggcagtatagccgtctctgcacaagaacagagaattaaagaagaaggtaagacggaattcaaatcccattggtttatgcaggtacaagctggtgctgcgcataccgttggtgaggccaaattcactgatcttatatctcctgcagttgcattgaatgtcggttatcagtttgctcccgcatggagtgctcgtgtaggcgttagcggatggcaggctaaaggtagttgggttgctccacggcaggattataaatataaatatcttcaaggtaatgtggatatagtatctgatttgagtacgctgttttgtggtttcaatcccaagcgtgtattcaatggctatatatttgccggagcgggtcttaaccgtggcttcgacaatgacgaagctgttgcaattaacgcagccggttacccgatgggctatctttggacagaaggaaagtttcttgttgccgggcgcttaggtctgggatgcaacttgcgcttgaatgaccgtttggctatcaatatagaaggtaatgccaatgttctttccgacaagtttaattcgaagaaagcgggaaatgccgactggcagttcaatgctttggtgggtttgactattaaatttggcaaaggttataaagaaatcccgcctgtgtattacgaaccggaaccggtcgtggtggaacaaccgaaacctgctcctgtggtagagcagccacaacctagaaaagaggtagtagtacagccaatgaaacaggatatcttttttgccttgaactcggctaagatacaagacgaccaaaagcctaaaatcaatatgttggtagaatatttgcagaagaatccgtctgccaaggtaaaagtgactggctatgcggatgctaatacaggaaattctaagatcaataaaacactgtccgaaaaacgtgcagctaatgttgcagaagttctgaaaacaaaaggaataactcctgatagaatcattgccgattccaaaggtgatactgttcagccctacaaaacaccggaagaaaaccgggtgagtatctgtattgctgaataaatcatgttgctcaaccgatacgtaagtaacggatgcgactactttgcgggtatctgtctctgtgaagcgattgatagtcgtttttccccactaaggatttccccactatagtccttagtttattttagtgaagagaggaaaggtctgcacttgcgaaagaccggacttttcgctaactctattcaagggacgttcctaatttcccctttttccctgggaacgtccctttttattgcatatcattgatgataatccttccccatataaaacttaagatatatacaaaaatgtcacacgcccaatagcactttgggattttgaacaaatatatccctatctttgtcttttaagatttagggaaatagaaagaaaaggtgttatggaagaagcatgggaaagggaatcttcttcctcttaaaacagccttttaagtatcatttaaattcgtataataatggggaatttaatttcattcatgaaagacgtagccgatgggctgcgggaaagtgggaattatgggaccgcccatatttacaggagtagtatgagagccgtcatttcattccacggaagtggaaatcttccttttcggaaagtgaatcaggagtttctaaaaaatttcgaaacgtatttacgtggaaaagattgtagctggaatacggtttccacctatatgcgcacattacgtgcagtgtataaccgagcggttgaccgacatcttgctccttatgtgcctcatcattttcgttatgtctatacagggacgagggctgacagaaaacgtgcactggacaaagaggatatggaacgattgatggcaaagctgccgaatcagctttattccggaatcagagacttacaacgtacacgtgccttctttttattaatgtttatgcttcgcggcattccattcgtagaccttgcttacttgaagaagcgtgatatagaagggaatgtcctgacttatcgccgaagaaagaccggcagaatgctgaccgtaactcttctgcccgaagcaatgaaactgatcaggcaatacatgaatactgatcctgcctctccttatcttttttcgctgatcgccagcaaggaaggaacagaagaagcgtatcgtgaatatcagctggcccttcgttattttaatagtcaactggtgattctgaaaggagtgttaggattgactgctgacttaagttcatatactgcccgtcatacatgggctacgatggcatattatagtgaagtgcatcccggtatcatttcagaagctatgggacattcatctatcacagtaacagagacttatctgaaaccttttaagaataagaaaattgatgaggctaatgcaacggttttctctccctttagaaaaacgtttttgaagataagttgctgataaatatggtgttacttcttaggtaacggcaagaaaacacgctgcaaatatggacatattttggaaaacatgcaaacaaaaaagatattatttctaataaacaactaaaaaaaggaaacacatcaaacaaaactgcggattttttgtgaagaacacaccttgctctctaatttttgcaaaagatttccctcccctctgccgtctctccaaagcaggggttaaaaatatcataacttatttattgaaaatggcccgcagacgcttctgtcggagtgggaaaatgtattatcccgttacctaagaagtaacgggcgagtattatttgaacttagtgtttaataatatattattaatgtaatttttaagtagttatgaagaaaaaatttgttagggtgatgcttttcggagcgttggcgcttgctaccggtgcatcgttcgtaggttgtaaagactacgatgatgacattgatgcggtaaatgccagagtcgatggaattgaaaaaactctctcggaattgcaagctcaagtgggaggctatgtgaagtctgtggtgtatgatgcatctacaggcaaattaacagtgactggtgcggatagtaaagagtacactataccaatgcctgaagaattgccatcgtatactcttgatgtgacaaaggatggtaagattactttgaagaaggatggtaaagaagttagttctggtactatcgacattcctgaaatccctgaaattccgacgtataaggaatttgatccattgttactgactgtaaaagatggctatgtttattatgatggcacaaaaacttctgttgcgattcctgagaccgcaaaaggatctattactgctatccttgatgaaaaaggagtcgttacaggatatagaattgtaacgatcgaaaacggtaaagaagttactggtgaattctctgtcatagacgctatacctttgaagggattagtatttgagcccacttgctatgtgggtggaatctctgcattgaaagctaacaacttgacttataatgcatggtctcaaaatgcgtacgctaaaccgtcagaaaccggtgaaacatataagtctaatcctacactttcttatattactccgcaaatctgggcatattaccacatgaatccggctagcgtttcaatggcacagattgaaagcctgaaattcctttcaggcgataaggattattatccagtttctcgtgctgctgcaatggatccaactgctaatataaagaaatcagatgtcgtaaccgaagacggacaacgttatcttaaagttgcaatggatgcagatgcagaaaagataccggcactgaattctggtaaggtagctgtatatgctttgcaggctcagaccaaagctattggtgctgacgaagctaaagtaattacctctgattacgctagtatatataaggtacttatgagcgacttcgttctagaaaccaaaattgatgcagaagacgtaatcttatatggacaaagcatttctcgtactggttctactcctaatgctaatgcaggtaaggcacaagaagctattgatgcaaatgcagattacactgtagctacagatggtacacttaaattagcagataaaatctctacttattataaagaaaacaatggtactgaattagttaagatgactaatattaaagataacggtctgaaatatgtcttcactgcttccaattacattggtggagctaataatgagacagaacagaactcattctttaatggtagtgatgctgctaaaggtattattaaccctgaatataaaggtcaggattctgaagcaactgaacatcgcgagccattgttacgtgtagaattggtagataccactaaggttcctaatcaggtagttgctgtaggatggattaagacaaagattgttaagggtacaattgacggattcggtaaagtattcactaaagatacttattactatggttgtgagaacaatgttgccaaattgacttacctcaacatgaatgatgtttatgctgaagcgaagttgaacaagcctgacttccatacagcatatacattgaagaaagatgatggaggtgctatcgctttgggtgaaggaagtacaggaacagtaactgaagtaacggatcctgaagctattgctactacagtagtagagtggacagtaactccggcagaagctttggctcttgttaaaaagtcgaagacagagatgttcgctactgtgacttatgaatcagtagacggaactcgtggagatatcacaattacgatgaaagcaagcatcgcaatgcctagtggagtaattaagaatgaccagaagattactgaagcttggtcacctgataagtcttatgtaaaagctgatgtgaaagaaccggttactgtagcagtaacagacttcaaacttgatctgtttgatgtatttgaaggtcgtaaggttgttgtttctgacgttacagaagcgaacttcccatcatttacgaaggataagttgactgcgaagtttatcttctcaggagctaaggatgtaactatcggaactgataaatacacattcactgtaacagctaacggtactcaattgaatgctagcaagaatagtgctactgcaactaagattgctacaattgatgctgacggtattattacttacaataaggctgacgagaatgcacaagcattgttgaataagtctgcttacaacgtggatccgttcactgtaggtattgaaattgtggtaactaacgaatgcgatgaaatcttaccgttgactggtaacaaatttgatgtgaagttcttgcgtcctatcaatgtagttgacttgaagtctgccgaattgcaggatgcaactacaggaactgctaagatcgacatgagcaagttacttggtttgacagactggagaggtcaagcgtttgctgtagcgcctatcgatttctatacttattatggagttactggtagtgcaatttcaattgataaggatcagatcatgacaacattgaatgcaagcgaagctgcaccaaaactgttgaaggacgttgcacctaacatgtcaattaattacacatgtaatcttcagaaaacaggtggtgacataacgtatggtgaccttgtttatgcaaacggtaagtttactataaatgcaccattcaaactgtttattcctgtaacggttaaatatacgttcggtgaagtaaccagcacagtaacattaacaattactccgactcaccagtaattgattgatctctaacgatagcaatatcgacaaagataagaagggtatctttttcaaaagaaggatacccttctttaataaagttaatgcaatatcatactaaaataataaagataagcatgaacataaagaaattgtggatgtctgtattcgccttactgttaagtagtacagtcattttcgcacaagaacaaggaataaaagaagaaggtaaaactgcattcaacccccattggtttatgcaagtgcaagtaggtgctgctcacacacttggcgaagctaagtttagtgatcttatatctcctgcagcagcgataaacgtaggttatcagtttgctcctgtatggcgggcacgtgttggtatcagcggatggcaggcaaaaggcggatggatttctccgcagcaagattaccagtacaaatatttgcaaggtaatgttgacatcgtttctgatcttagcacactgttttgcggttttaatcccaaacgtgtattcaatggttatgtctttctcggaggaggattaaatcgtggttttgataacgatgaggcgaatgcactggatacacgaacctatgagatggaatatctttggcaggacggaaagtttctcgttgccgggcgcatgggtttaggatgtaatctgcgtctgaatgatcgcttgtccatcaacatcgaaggtaatgcaaatgtcttgtccgacaagttcaactcaaagaaggcaggaaatgctgactggcagttcaatgctctcattggtttgaatattaaatttggtaaaggctatacggaaactaaacctgtatattacgaagcagaacctgtagtagtggaacaaccgaagcctgctcccgtggtggaacagccacagccgaagaaagaagttgtagtacagccaatgaaacaggatatcttctttgctttgaactcagcgaagatacaagacgatcaaaagtcaaaaatagatatgttggtagaatatctgcaaaacaatccggctgcaaaggttaaagtgacaggctatgccgatgtaaatacaggcaatcctaaaatcaacaagtcgttgtctgaaaaacgcgcaggcaatgttgcggatgctttgaaggcaaaaggaataaccactgacagaattatggttgattccaaaggagacactgttcagccatataaagcaccggaagaaaaccgtgtgagtatctgtatcgccgaataaacaaagttattaacaagatattataagaagatattctaaaaaatatgttgcttcatcggtacaaaagaatttctaatggtgtagaaatatcattgatacagtaagtaccgaatgcgactactttgcgattatgcgctcctgtgaagaagctgataatcgtttttccccactaaggatttccccactatagtccttagtttattttagtgaagagaggaaaggtctgcacttgcgaaagaccggacttttcgctaactctattcaaaggacgttcctaatttcccctttttccctgggaacgtccttttttttaattaaatcaaccctgcctcagaatactttcaattaacatttttaagtgcattttgcagctaattccccttgaaataggactaaacttgctataagtttcttcttcttccgcatgactttaaaatataaaatgtacatttgtagcataaacaaaagaaagaagatgaaacgaaattacgtaaagtatacttcgggagctattctgacaggactaatcctattcacttcctgccaatctacccgtgaagttcaggcaaattatgaagttgtccagatagaaggaacccggatttgtatggattcaacctgggatgctcatcccgacgaaaaggctgccgccctgcttaaaccctacaaagaaaaaatagataagatgatgtatgaggtgattggcgtcagcgagatgacgatggacaaaggacgtcctgagagcttgctttccaatctagtcgccgaagtgctacgactctctgcagagcgtgtactgaagcatcctgccgatattggaatcatgaatatgggcggtttgcgcaacatacttccacagggtaatatcacagtcgatgctgttttcgaaatacttccttttgaaaattctctctgcgtactgacgatgaaaggtacggaaataaaaagactgatggaagtcatagcttctttgcacggtgaaggactgagcggagcacatctggaaataacaaaagacggaaaacttctgaaagcaaccgtacaggaaaaagagatcgaagatgacaaagactataccgtagctaccattgactatctggcggacggaaacgacggactcactccctttatcaatgcggataagcgtgaatgtccggatggattgacattgcgcggactgttcctcgactacgtaaggcaacagacagctgcaggcaagaagattacctctaaactggatggacgtatcaccgttgttccggcatccgaccggaaataaaaaaatgaaaagagaataaataaccaaggtttacaatgaaatctcagtatcctatgacaactcataatcatataacttccgtcttgaatatattcaaaggaagaaccggaaagtggctgatgcttttcctccttttactacctgcattggcaactgcccaagaaacaaaaaaactaatcatactgcaaaccagtgatgtacacagccggattgaacctatgactcaggaaggcgaccggaactacggtcagggtggatttgtccgtcgggcaagtttcctgcagcagttccgcaaagaaaatccggatgtactgctgttcgattgcggcgatatctcgcaaggcactccttattataatatgtttaaaggtgaggtagaagtcaccctgatgaatgaaatgggatacgatgcaatgacaatcggtaaccacgagttcgatttcggtttggacaacatggctcgtctatttaaattagccaagtttccggtagtatgtgccaactatgatcttgatgccacagtactcaaagatatcgtaaaaccttatgtcattctggatcgtttcggcttgaagatcggagttttcgggttgggagcgaagccggaaggactgatacaggccaataaatgcgaaggggtaatctataaagacccgatcgccgtatccaatgacattgccgcacaactgaaagaagaaggatgcgatgtcattgtatgcctgtcacatctgggtattcagatggatgagaagctggtagccaacacccgtaatatcgatgttattctgggtgggcattctcatacctttatggaaagccccaagaattatctgaacatagacgggaaaaatgtccccgttatgcacaccggaaagaatggaatttatgttggacgactagatttgaccttgaataaaaaatgagattactaacatatatactggctatcctgctatttcttcctgtcaaggccaggggagaagcaatagatactcccgtagaacctttactactttataaagctaaacaagatgtccgttgtcaacaatgggtagactccattatgaataagctgacgcttaaagagaaagtcggtcagttgtttatatatacgattgctccggtagataccaagcgcaaccagatactgctgaaggatgccgtcgatacctataaagtcggcggactgctgttttccggtgggaagatgcagacccaggcggaactgactaatcgggcccagcgcatggcaaagttaccgttaatgatcacttttgacggagaatgggggctggcaatgcgtctgcgtggtactcctgtctttccccgaaatatggtgctcggatgtattcaggataataaattaatctatgaatatggtcgcgagatggcacgccaatgtgtacagctaggtgtacaagtcaactttgctccggtggcggatgtgaatatcaaccctaagaatccggtcatcaatacccgttccttcggtgaagaccccgtacgggtggcggataaggtagtagcttatgcttccggtctggaaggcggaggcgtactatccgtctgcaagcatttccccggacatggtgatacggatgtagactcgcacaaaacacttccggtacttcccttcactcgcgaacgtctggacagtgtagagctccatccttttaaagaagcgatccgtgccggattgagcggtatgatggtcggacacctgcaagtgccggttattgaaccgataggcggacttccttcttctttatcccgtaatatcgtttacgatctgctgacagaagaatttgcattcaaaggactgatcttcacggatgcacttgccatgaaaggtgtttcggggaatggaaatgtcagtctgcaggcactgaaggcagggaatgatatggtgctggctccccggaacctgaaggaggagatagccgccgtactcgatgccattgataagggagaattgacacgcgaagatattgaagagaaatgccgcaaagtactgacttataaatatgtgctcggactaaaaaagaaaccgtttgtccagctatccggtttgggacaacggatcaatactcctcagacacgtgatttaatccgtcggttgaatctggctgcgattactgtgctgaataatgaaaatcatgttcttcctttgcatacgaatcaaaaagaaacgatggcattgcttgaagtcggtgatgcgggtgaaaccaatgcattggcggaacagttgtcgaaatacacttctttgtcacgtttccgtcttcgtcccggtatgacggaagaggcgaatcagcggttacgggactcattggctgcctataaacgaattattgtcgccgtaagtgaacagaagctgtcaccttatcagaccttcttcggtaaatttactactgaaactccggtcatctatgctttctttacgcagggtaagatgatgttgcagatacagcgtgcggttgcccgtgcctcggcagtggtgctgggacacagccctaatgaagatgtgcagcggcaggtggcggatgtgctctttgccaaagctacggcggacggaagattatcggccagtcttggagaactctttcaggcaggagacggtgtcacgattactccgaaaacacctttgcattttattccggaagaacatgggctttcttctgtcgccctgcaacgaattgattcgatcgctttggacggtgtacgtcagggagcttatcccggttgccaggtgatcgtgatgaaagagggtcatgtgatggtagacaagacattcggcactcacaccggaacgggaagcgcacgtgtgcagccgaccgatatctatgacttggcttcactctccaagactactggtacagtgcttgctttaatgaaactttacgataagggacgttttaatctgacggacagaattgcagactatctgcctttccttcagcgtactaacaagaaagacataaccattcaggaactgctttaccatcagtccggcttgccgcccggaattgctttttatcgggaagccatcgatgaagatagttatgaaggcagactgttcatgtcccgcaaagatgcacggcatccgttgcagttgggaacttccacatgggcgaatcctaattttgcatttaaaaaggaatatgtttcaaaggttaaaaccggagattacaccttgcaaatctgtgatagtctgtggctgaatccttctttcttcaaggaaatggagaagaagattgcagacgcaccgatgaaacctaaaacttaccgatacagcgatgtcggttttatcctgttgcgtcttctggttgagaaacttgcgggaatgccgatggatgcctacttgcaacgtgaactttatgaaccgatgggactggaacgtacaggataccttcctttgcgtcgctttccgaaatcggaagtcgtaccttcttctgtcgaccgcttcttgcgtaagactacccttcagggatttgtgcacgatgaggctgccgctttccagggaggcgtttcgggaaatgccggattattctcgaatgcacgtgaagtggcacaggtttatcagatgttgctgaacggtggtgagttgaacggacagcgttatttaagcaaggaaacctgccagttgtttacaacggaagtttccaaaatcagccgtcgcggacttggatttgacaagccggatacccgtaatccggaaaagagcccttgcggaaagcatacaccggcaaaagtatacggtcataccggatttaccggaacgtgtgcctgggtagaccccgacaatggcttggtttatgtatttctgagcaaccggatttatccggacgtaaccaaccggaagctaagccgtctggaaattcgcgaacagatacaggatgcgatctataaagcgattcaaagcaaataaaaaatgaagagcccctctgccgaagtagaggggctcttgcttattaatgtaaaatcaagtagttgctcgggttagaatgaaacacccacgcggaaaccgaagttgttcagtccgtctacactgtaatgcagtacatcagccttattggtaccatagctgtagtacagagcaaagtgcagacccggtccgtaaacccaagggaatacattgacacctacttcaggagaagcgtagaatccccagctgttttctctggcttccaacatattgaagttggaacggatcttagcatattcagcacctaattttgcactgacataaggttgtacggctccaccgcgattccattggtagcgggcggcagcaccgaaaggcaactggaacattgtgtgttgctgatcagttgtaacgtcacctgcacctatcttgaatgtttcgcgaggaatatactcgtggttgctgtgatagttcaggaaaagacccagacccaggttaggagtaacgaaataaccaccttcaaagttcataccccaaccgctggctttgtctgcaaaattattgctcaatggaacattgaactgccagtctatattagcatatccattgtctgatagctgtgccttagccggcatggcaaaggcgatggcaatggctgctagcgccactaccttgaaatatatattctttcttgttttcataacagttgtaattgtttatttgttagtaagataaggtgactgagtgaatgactggttcactgcttcaatagcaagagtgcggttgatagctttagagcctgtttcaaatccagtcagatagcttgtccagactacaggaagttttttgccttcaccttcatctgctttcaggttcaccatttctgtaatgaatgagttggtgctatagctgtaggtcacagcgtacggatagtaccatccgccccagttaccccagtagctgggtccccagtagccgggatatccccaccaccattcaggttgtgtgtagccggtgaaataataagtacttgcgatgtagcttacttgaataccaagatcggcactttctttatcggcagccggttgataaccttttgcttccatattttctgtataagcagccagaatttgctcagcgccttctccttcgagatattccggttctttgctgtcagagataaccaagattttgtcagccagatagaatgtgctgaagtctttgaagttggcttgcttgtcgtagttagtgtataccagatagttgtcatccagcttacccatgtccgggtctttttcgcaagaagcgagtgcaaagaccgccaataaaataggaattaatttcttcatatcttttataatgtttaggttatataaaaatcacgccctggtaccttggggcttttgttacaaacaacaagaaatgtgtaaaaaggttcgtgcaaatgattatctttgcgagaaaattaacactcaaatgcttatgaaacacattcggatacctcttttcgtatggttctcaatcgtgctgctgatcgcagttgcgcccgtctcattgtcggcgcaggaatcgtttattcagaagatcgaaaaaaataagtccgtcagcggaataaagtcgctcgacaccagccgcttcccggaaaagtatgtaatgtacctgactcagccgctggatcatcgacatcccgaaaagggaagtttccgccagcgggtgattgtgggacacgtcggttatgaccgtcccacagtgattgtcactgaaggatatggggcagggtatgctttgcgccccacttatcgggaagaactttctgaattgttcgatgccaatatgatctttgtggagcatcgctactttctcgaatccactcccgaaccgtgcgactggcaatacctgaccgcagagaattctgccgaggatttgcatgccgtgacaaccgctttcaagactttatatcctggcaaatggatcagtacggggatcagcaagggtgggcagacctccttattataccgtgttttcttccccgacgatgtggatgtttccgtgccttatgttgctcctctttgttatgcgcgtgaagacggtcggcacgaacctttcctccgccgggtaggtacggaagccgataggaaaaaaatagaagatttccagttggaagtattgaagcgaaaggctcgtttgttgccccgttttgaaaaaatgtgtactgaaaagaactatacattccgcgctcctctggaagaaatatacgatttctgtgtgctggaatattctttctctatctggcaatggggaacggatatccgtagtataccggaaatctcggcttctgacgatacactgctggatcatttgctggcaatcagcggaccttcttattttatagtagacagcccgactctttctttcttcgtgcaggctgcccgcgaattggggtattatggatacgatatcgctccttttaaaccttacctttctataaagaccagcaaggattatctgagaagactgatgttgccggaagatatgcggaagatgaaattcgataagacattgagcaataagattgtgcggttcttgaagaagaacgatccgaagatgatttttatctatggtcagaatgatccctggacagctgccggagtaacatggctgaagaataaaaagaatattcatgtttttgtagagccgggaggcagtcatcttgcacgcatcggtacaatgtccgaagatcagaagcagaaagtgatgtctcttcttagagggtggcttgaagaatgacgaaacgagaaacggtgaacaacctgtaatatatgaacaggcggttcaccgttttattcttctgcaagccgatattacatgtatcgggctgcttgatttaggaatctaccgattcgaatagcggtttcagtaattccggtatttccactttttcaagtgctaattgtcggactagttttttaccgctctgactgagatggaactgcatcagtcttcggtcctcttctccgagtgttctgacaatcagttctttttcttccagaatccggagcatctttgaagcgtgagagggtgtcagctccgttcgtttggacaggctcgtggccgtcatattattgggcgaggcttcttgcagggcacataatatcatcgcttcatttaatgatacctgatacactttttcaaatgcatcttcaaatcttgccattgctttgaatacatcgcgcattacacatattgtcttcatatgctacttgtttttttgtttgttctttttctatataaacaggttgatatttgcattatccgcccgttccatgtatgttgctactccgcctattgtcacttcgtccagaagttcttcctgtttcactcccatgacgtccatggacatttggcaggcgataaattccacaccgttctccagagcttgttggcgtaaggactccagagagtcgatgcctttccgattcatgatgtaccgcatcatttttcctcctattcctcccatgctcattttagagagtttcaactttcgggagctggaagggagcatcatgccgaacatttttccaaagatatctttttcgacgttcggcttatgcagcttcttgataacgttcagtccccagaaggtgaaaaagatcgttaccttttgtccggtggcagctgcgccattagcgagcacaaaggtagctaaagctttgtctaaatcatcactgaacatgatgaaagtttttcctttgccttcacaggaggtaacaatattgcaggatttaggttcgcccttttcgatcactactacagattttcctcctgctgtttctttggaaatcaactgatttcctgtcgagttgcaccatgcggcagcatcacgcgggaatcccggatcggttgaggtaatttctacccggtcgccggaaaccagcgaatccattgtctttttcattttcagaatcggccccggacattgcagtccgcaagcgtctacacggattgtcttcactgcttcaactggtgaaactgtcttttgaggttgcgcatctgccggctgttgtatgtttgcgttcggttgtgcaggtacttcgttctcactttcttctctcaggatgatgggtgctgcggcagcgtggtatgttttcaatcctccggaaaggttgcgtaccttttcaaatccatgctgtaccagaatgcgataagcaaggtatcctctgagtccgacggcacagaatgtatagatcatcttgtctttcggcagttcatccagccggtcacgcagttcgtccagcggaatgttcactgcacctggcagtgtattgagcgagaattcgtcaggagtacgtacatccagcaggaaattgttttccatctcgatatccctcaactgtctccaatagacgggttgtactttcccagttatgatgttttcggctacgtatcctgcaacggctaccggatctttggcagaagagaacggaggggcgtaagcctgctccactttcatcagatcatagatcgtaccttcatgcttgatgacaagcgcgatttcgtcaatgcgtttgtctacaccgtcatagccgacgatctgtccgccgtacagtttacctgtcttcgggtcgaaagtgattttaatactcatcggcatggcatccgggtaatatcctgcgtgagaggacggatggatggtcgaagacatataattgatttctgcctgccgcaatcgtttgccgggtaatccggtagaagcaacagtcatgtcgaatacttttgcaatggaagttccgatggctccttcataagggatgtgtgctccctgaatgttgtctgcgacaattcgtccctgacgattggcgggaccagcaaggtaattgagccacggctttccggtgatcgggtggcggaattcgatagcgtcaccgatggcgtaaatcgattcgtccgacgtttgcaggtagtcgttgacggcgattcctccggcttcgccgatcttcagttctgcggcacgtgccagtgtcgtttccggacgtacgccgatggaaagtataacgatgtcggcagagatggactgtccgttcttgaagatgactttcaatccttttccgtctctttcaaaagaggctactgcctgctccagatacaggttcactcctttgtccatcaaatgctggtgtacaagggatgccatggagaagtcgatgggagccatcacttgattgcccatttccacaatagaaactttagctccttgtgcgtgcaggttctctgccatttccagcccgataaatccggctccgatgacaacagcctttcggggagcatgactgttgatatattctttgattcggtctgtgtcggctacattcctgagtgtgaagattccgttcaggtcgattcccggcaggggaggacgtacaggggaggctccggtcgatatcagtaatttgtcgtagctttcctcgtaagtgtctccgctactttgtcttaccgttactgtttttctcttccggtcgatgaagattacttcattttcagttcgtacgtctacacgaaagcgcgtagaaaatgcttcgggggtctgtacaaacagtttttcccgttctttgatcacgcctccgatgtaatacggcagtccgcaattggcataagagatatactttcctttttctaaaaggatgatttcagctgcttcgtttgtgcgtctgatccgggcagcagtggtagctcctccggcaacgcctccaataataatgatcttcataagtttgttgcgtaaatagtttcctgtggaaataacaataaagtagggagaattgttctcggatcatagaaaaaagacttatatttgcgcaccctgtttgtctttcttcattttttataaattaattatgagtaaaattcttatcattgacgatgaggttcagattcgtagcctgttggctcgtatgctcggactggagggttatgaggtgtgtcaggcaggtgattgcaaggcagctatcaggcagttggaaattcaacagccggatgtggctttgtgtgatgtctttcttcccgatggaaacggggtcgatctggtgttgaacattaaaaagacagctccgaatgtggaagtcattcttcttaccgctcacggtaatatacccgacggagtgcaggcaatcaagaacggtgcatttgattatataaccaaaggggacgataataataagattatccctctgatcagtcgtgccgttgagaaggctaagatgaatgtccggttagagaaactggaaaagaaagtcagtcagctatattcttttgattccattctgggagaatcgaaagtgctgaaagaagctgttatgctggcacagaaggtttcggtgactgatgttccggtgttgttgaccggagaaacggggaccggaaaagaagtatttgcacaagccatacattataatagtaagcggagcaaacagagctttgttgccgtgaactgttcgtctttcagtaaggaactgctggagagtgaaatgttcgggcataaagccgggtccttcaccggagctttgaaggacaagaaaggactcttcgaagaagccaacaacggtacgatctttttggatgaaatcggagaaatggcttttgaactacaggccaaattgctgcgtattctcgaaacaggcgaatatataaagataggagatacgaaaccgacgcacgtgaatgttcgtattattgctgctaccaaccgcaatctgacagaggaaatcaaagcgggatgtttccgtgaagacctgttttatcgtctttcggtatttcaggtacatctgccggcacttcgcgaacgtaccggtgatatcagaattcttgccactgcctttgcaaagagcttttccgagaaactttcgtatacggtcaatgagatgactcctgcttttcttcatgcgttggaacagcaaccctggaaaggaaatatccgtgaattgcggaatgtgatagaacggagtctgattgtctgcgaaggcgggcatctggatgtgtgcgatcttccgttggagattcagaatactcattatgaatgttcggatgataatatcggtagttttgaactggctgctatggaacgaaggcatattgcccgcgtcctggaatatacgaaaggcaacaagacggaaactgcccgcttgctgaagatcggtcttaccactttgtacaggaagatagaggaatacaaaatataataatatgactatctgatttcttttttaggggtatatgagcgattaatcgttcatatactgatctgtaatgtgaaaaagaaatagaagatatgaatatttggaagactacactgttacttgttttattatttactggtatcaccgttcatgcacaaaaagtaaaaatttcattgaatagtgatggaaatctgacgatatggaaagtgaaagctcaggcagaaattgagcatccttttgatatgatgactacccgatatgacacgagggattgggtcaaagcaactgtgccgggaacggtgtttggttcgtatgtattagaaggactggagcctgatccgaattttgctgataatgcgtataaagtcgataaagcaaaatatgaccgtaacttctggtatcgtacagagtttaattcgccggaggtggaaaacggagaaagggtatggctaaattttgaaggggttaaccgtaaaggagaaatattttttaatgggacgcgtctcggattgcttgatggatttatgcatcgggggaatttcgatataaccgatttgctgtcaaaaaacggtaagaatgtgcttgccgtccttgtgcattgggtaggcactccggttcccaattatgcaagtcctacttatatgtcatgtgccggctgggattggatgccttatgttcccggtcttttgactggtattactgacgacgtctatttgacaaaaaccggcgaagtgtctatcgtcgatccttggatacgttcgaaagttccttctaaaaacaaagcggttttaagcttgcagttggaactacggaatcatacagatatagagcagaaaggagtgttgaaaggtatcattcagccgggcaacattgaatttaccgaagatttggtaattgaggcaggcaaacagcggacttttcttctggatgatagcaagttcagtcaatttataattcagaatcctgctttgtggtggcctaatggttacggacagccgaatctttatacctgcgaactgacttatatggtgaatggtaaggcttctgataaacagaatattacatttggtattcgtgaatacggttccgagctggttgacggtgtgcttcatcttaaaataaatggtgaacctgtttatgtaaaaggaggaaactggggaatgagcgaatatatgttgcgttgtcggggtgaagaatatgatcttaaattgaaacttcacaatgagatgcattttaatatgatacgcaattggatcggttcggttacggatgatgagttttatgaagcttgcgataaatacggcattatggtgtgggacgacttctggttaaattcaaattcgaatcttccggatgatgtttttgctttcaatatgaatgcagtggaaaagatcaagcgtttgcgtaatcatgcttgtattgcagtgtggtgtggtgataatgaggggtatccgttaccgcctcttaataagtggctggaggaagacgttagaacatacgatgggggtgatcgggcctatcatgccaattcccatagtgacggcctttccgggagtggaccttggactaactctcatcctaactggtattttaccaaagccccttatggatatggtgccaatataaccaaaggatggggattccgtacagaaataggtacagctgtctttactactttcgatagctttaagaaatttgtgcccgaaaaagattggtggccacgtaatgaaatgtgggacaagcatttctttggcaattcggcggggaacgccagtcccgacaaatatttctctaccgtagagttcaattatggtaaagcgaaaggtattgaagatttttgccggaaagctcaattagtgaatgttgaggtgaataaagcgatgtacgaaggctttcaacatcatatttgggaagatgcttccggcatattgacttggatggggcagtcggcttatccttcattggtatggcaaacctatgattattattatgacttgacgggggcttactggggaatcagaaaggcgtgtgaaccggttcatattcagtggagttatgctgataatagtgtaaaagtgatcaataccactttgaaagagcagaaaggacttacggctacaggtaaagtctataatctggatgggaaagaaatggggcgttatagccagtctgtagttttggatgccgccgctaataaggattcctattgtttccatctgaattttacaacagacaaccttgctttcggtaagaaagcggttgcttcctccatttcggcagatgccggagagccaagtgccgcgattgatgccagtgatggcagtcgttgggcgagtgaaccccgtgatgaagaatggatttatgttgatctgggtgaacctactgaaatagcctctgtcatattgaactgggaggctgctcatgcaaaagcttataaactgttgatttcggatgatgcaataaactggaaagaaatttatatcaatgaggactctaaaggcggtgtcgaagagattaagataaaacctgtttgtactcgttatgtgaaaatgcaagggttgaaacaggctactatgtggggatattcactttatgaatttgaattatatggtagaaaaaagaagccaacggatttgactcctgtgcatttcatcaagttggaactgaacgatgaaaacgggcaactgctttctgataacttttattggcgttccaataaaccgggagattataaagcattgaataatttgccgaaagccaaattgcgcacaacatcaagcttagtggatagtaatggtaagaaagtgattaaagcaaagatcgaaaatgtgggatcatcagtcgcttttgctgttcacgtacaggctattcgctcttctgatggtgagcgtatattacctgctttgatgaacgataattatttcacattgttgaaaggagagtctaaagatattgaaatagaatttgattcggatttgttgcctgatggtaattatagtttaagtgtgattccttataataaataatatcgggcggacatttctttaaatgaggtaaacacggttgtagcaacatcggttttatgacttggttttaccagtctttgtgtttgtctatgatttttcaaatgtagtcgtgattcatcataaactttaagaaaagtttattgatgaatccgctacattaaaatgcctcatagaattgtgaggatgccggcagtgacgggagtatattatgataatgccgcaatgcctgtccctatcaggtttgcgttattcatactttttatatccacttcaatatctttcaggccgaataattgaaggagttctctcagtttttccataacgagaatgttatagtttttatccttcctgttttcactccagaaaaggctgccttcggctaccaggcaaacctttcgtatatccttattataggatttcagtaacatgataagccccgtaagtgaggcggcaaccaattgtgcggatctgccataaatccattgtgctacctgtacatatacatccttgtagatgtccgggtaattcataatggaagtcagtttctgtgcgtcgaatttctcttcgaactcttccagcggaaaggctgttttcagtatgtctcccagatacataccggataccgctttctcaaaacgttgctttcccggattaccggaaatagcgtcaacggtatcatctaccgcagtcagaaagggcggatggaaattgcctgattccaaattgacaggaatcaatccatgtgcattgcatgactgatccagtttttcaattttatcggcagggataaaagttgccatattggttcctgtccctacgatgaggccgatatatgcatcataactattatctgtgagaccggcgaataaactggctatagtatcgtttactaccttgatgcctgtaaacttaattttgtttctttcattcagatagtcgagtaaaggttttccgataaattctccaaccatttctttaatatctactccttttgtccagcgtaacagtttggcgtctccacccggtacggactcggccggataagaaaaacaataaccgataggcatttcttcctcacgtttgattcctataatcatatcggcgagttctttgaataactcttcgcgggtatatccgacggacttcataattgacatgtcttttttccagccattgttcgggtgaacggttggtgttgctttgtcgaaatctacgattgccacccgataattggttcctcccaggtcaagtaccagtgactttcctttaatatgggttgtttttggagcaatgaaagtaggaatgcattgtatctctgcattttccgtttttaacccttcttctgttttatcccgaaatgagcatacaatcgctttgagctgttcattatctaacttaaaaatgtttttttccatgacattgactttttatagtataaaatatccttgtctttgaataacaactgaaggtggattttgctcgggaatgcccaatctttatttgcctgtatctataattatgtatttgttttttcaattaataaaaactatatttgtttgaaaaataatttgatacatgaaagagcggtctccagttaaaaagaatatactaaaattgattccttttatagagattattgcaggaatcatttttctctgtttggagattcatgactatcgtactttgtattctatggccgaagctgatgcaatgtatgggggacttgctgatttttgtaagtacaaagagaatgtattttgtccggcatttttctggataattgttatactgacaggaatcagttattggaaaaataaaaagttatattggattttaacgcaggcattggtgtttatggtcttttttagagctatgtttccgttttatgccatttttatagagttaaatccagtagtcttttatattcttccacttttgtactctacagtattctttgtggtagaaagaaagttattcaaaatcaagcaaatagattctgttgatattacagttaaaacaaaaatcatggggatcggaataggtatcttatgtactatcatttatttcctgctctttttgaccgttttttgcttaatatgatagccgtctatatttatttctccacagtaattcaacgcgacttttgctctcatgccctaacagattgtctgtatgcctttattcatcttagtttcaggtatggcagcaactgtggtagcagttatgagagcaagtgtttgctctcactcttccatgtatcattatctgtcatttgtttgatgttgtcatttgatttacagtgtgttaatgtctgaggtgtcaattcttaacgattgatatttcagacattaataattgataaatcatcctttaatagttgataactccgctgtttttgagtgataagtgatttattgtttcttggaagagtaggttaatcgaacagttggtgcggtcaagttaattgaatcatataagtaagggatcagtttcctgccttgtttcattcattccatcggctggaaccactgttttcaagcgtccgaaactttgttttcacggctttgaaactaaagtttcaagccgatgaaactttagttccaagcaggagaaacaaaagtttcaagcgggagaaactaaaaagctctgtatagactgatgtgtactggttttagttgacaacttcgtttgttataactgaattagtttactcaatatactttaatatctaaataggtttacttttgttattcttattcctatgttagttgtcttttgttggtgcttgcaaatttatgcatcttcctttatttacgcaagccttcttcaggaaaatgtaatgttgccaacaaccaaaaactcttcggtcggggatcgccctagcggcaaggggcgggaccacccgtcccgacgagcgggtattatgctgttaatcctcccgtttcgctgaccacttccataggtgtcctcatgtttatcccttgatgaggccgcacatgattatatacatatacagcatcttcaatgcgcttgcttacttgctcgaagctctcatcatcacagtcgaatagccaaccgtttttaatggtgttgttcattctttcagccaatgcattatgtaaaggatcaccacactgcgtcatactgatgttgatttgatgctctttaagcctctctacatatttatttgagcaatattggacaccccggtcggaatgatgaataagagtgctcatgtctatgtgatacttctcatagaatgatattgccatctccaaagctttcaagggcccctccgtctcaagagttttgtaaagcgcatatcccacgatggcacgacttgacgcatcggtaagcaacgagaggtaagcccagccctgaccggtgtttacgtaggttatatccgccactaccatagcgcccaatcttgtagcgacaaatttgggtgcaacattcaacagatcggggtagatatagtaattatggttcgaattcgttgttttaggacgcttgcgacttgtacgttgacacaaaccattggagcgaaaaatgtcatagcaacgatcacgaccgataaccatctttggtccaaacttactcacgcagcaggcgtataactcgcgcataccagctttgggcatgagttccaacagttctttgcagtacaacacgatgcttgtggtaaggatatcaacctccaaatgtcggttcacatgcttgtaataaccttgtcgggttatgccgaagtaatcacagaggaactttatacaaccacgtttgcgtcggggtgagtgcctctgtgacaaggtgtcgattacttggcatcggagttttttcgtaccttgatatgatacgtggattcagcaagattgatgagttcttcgcacgcctcgtgacgtaaactctcatcagcaagagcccgatgaagtttacggttctcagcacgcaatagcgatagttctttctggagctcagaaatactagaatcaatagcatcgctatttactggtttagaggatctacccatatctttgtcttctatttgatacttgttaagccaataagtaagaagcttggcacaaaagccgttacgcttacaaaactcagatttgctctcgggacttgataaatactcacgaatataagacattcgttcatcatcactgtaatagttgtactgctttttcgaatatttcatctttattttcgatttttgaagtgtcaacttattcagtacactacagaccaaccaacagcccataagtaaccattgacaacacggcagtgtgacagcaaaatttgccgtcacactgccgtcacctacttctgtcacctcattaattattcatattcaagcaattacatccgacaccgtgacagatgacagcaaattatagttttttattttcatagagagcctggctgacacgtaagtaggggttgactaaaaagtccccctaagaatgtttatcgaattgttgcggatggcagagttttttctttttccaatagtgtagaactttaaaagactcctgtctctaccctttttttcgtattttcctcccttgctacgatttccccttcttcctgccttcttccttttcagtctttcaatccccttttcctccgtccttttttcctttttctttggattcccgttctggtttcctttgcgcatcttcttcacctttcctgtatttcctcttcatttccctggtgcatacgcccgtgtcctcgcccttctaacgcgcgtgtgaatataataaggtgtacccctttccgcctttcctcctgtatccgagaaaaacatgttctacaacatccttataattcaacactttagcttctatcctcaaaaataattcaaaaaaagagtgatttaagtttggagtatatttgaaaagggcgtacttttgcacccgctttccaagagaagaaagccttgttaaattgacttagtgtaaaagcgcagtactgcttgaccataagaacaaaaaaaacttccgataaagtttggaagataaagctaaaagttcttatctttgcagtccgattcgcaaagaaaaggcgttttgtttttcttctttaccttctttccctttcgctaagagagtctgagaaacgatagaaaaagaaaagcgaaaaaaacttccgaaaacatttggtagttaaaataaaacctcttacctttgcacccgcttttaaaacgaaagcagcaagttctttgaaatattgataaacaatacaagtagtacaagaaaaaaatagaaccgtcaatacttgtcttatatatattaatatgtgtgagacgtaaggtattaatgaagtcaataaattgtacggcatcctgaacagagcaaaaatcagctttatgctgactaataatacttttacaatgaagagtttgatcctggctcaggatgaacgctagctacaggcttaacacatgcaagtcgaggggcagcatttcagtttgcttgcaaactggagatggcgaccggcgcacgggtgagtaacacgtatccaacctgccgataactcggggatagcctttcgaaagaaagattaatacccgatggtataattagaccgcatggtcttgttattaaagaatttcggttatcgatggggatgcgttccattaggcagttggtgaggtaacggctcaccaaaccttcgatggataggggttctgagaggaaggtcccccacattggaactgagacacggtccaaactcctacgggaggcagcagtgaggaatattggtcaatgggcgcaggcctgaaccagccaagtagcgtgaaggatgactgccctatgggttgtaaacttcttttatatgggaataaagttttccacgtgtggaattttgtatgtaccatatgaataaggatcggctaactccgtgccagcagccgcggtaatacggaggatccgagcgttatccggatttattgggtttaaagggagcgtaggtggacagttaagtcagttgtgaaagtttgcggctcaaccgtaaaattgcagttgatactggctgtcttgagtacagtagaggtgggcggaattcgtggtgtagcggtgaaatgcttagatatcacgaagaactccgattgcgaaggcagctcactggactgcaactgacactgatgctcgaaagtgtgggtatcaaacaggattagataccctggtagtccacacagtaaacgatgaatactcgctgtttgcgatatacagtaagcggccaagcgaaagcattaagtattccacctggggagtacgccggcaacggtgaaactcaaaggaattgacgggggcccgcacaagcggaggaacatgtggtttaattcgatgatacgcgaggaaccttacccgggcttaaattgcatttgaatatattggaaacagtatagccgtaaggcaaatgtgaaggtgctgcatggttgtcgtcagctcgtgccgtgaggtgtcggcttaagtgccataacgagcgcaacccttatctttagttactaacaggtcatgctgaggactctagagagactgccgtcgtaagatgtgaggaaggtggggatgacgtcaaatcagcacggcccttacgtccggggctacacacgtgttacaatggggggtacagaaggcagctacctggtgacaggatgctaatcccaaaagcctctctcagttcggatcgaagtctgcaacccgacttcgtgaagctggattcgctagtaatcgcgcatcagccatggcgcggtgaatacgttcccgggccttgtacacaccgcccgtcaagccatgaaagccgggggtacctgaagtacgtaaccgcaaggagcgtcctagggtaaaactggtaattggggctaagtcgtaacaaggtagccgtaccggaaggtgcggctggaacacctcctttctggagcgatgtcgtaacaacgatttcataggttctattattgtactactggtacttgtttatttataacatatagatcaaccatctatagaagtatagatagagataaacaagagaaataaagaagccgagtctaacatcaggtagacaaggttgaactagtcctatagctcagttggttagagcgctacactgataatgtagaggtcggcagttcaactctgcctgggactactccgaacaaaaattgtcgttgccaatacattattgcgatgttcaattactcttgggggattagctcagctggctagagcatctgccttgcacgcagagggtcaacggttcgaatccgttattctccaccatctctgaaaacagagaaacgatctttgacatgatgtacaaaaagtaaaatttagtaaagagctaaaagtatatatcgaaccgtacgttttaagtaccgcgatattgagtacccgggtttaatacctgatacttgatacctgatacttaaaggtaagtttgaaagaaagtaagcaagggcgcatggcggatgccttggctctcggaggcgatgaaggacgtgataagctgcgataagctctgggtaggtgcaaataacctttgatccagagatttccgaatgggacaacccggcattctgaaggaatgtcatccatctttgatggaagctaacgcagggaactgaaacatcttagtacctgtaggaaaagaaaataataatgattcccctagtagtggcgagcgaacggggaatagcccaaaccacccatgttacggcatgtgtggggttgtaggaccacgatgtcgcaagacatttgacgagtagaatcctctggaaagtggaaccatagacggtgatagtccggtatacgaagtcaaattaagcgtagtggtatcctgagtagcgcgggacacgagaaatcttgcgtgaatctgccgggaccatccggtaaggctaaatactcccgagagaccgatagcgaaccagtactgtgaaggaaaggtgaaaagcacttcgaatagaagagtgaaatagtccctgaaaccgtgcgcctacaagcggtcggagctgcgtaagcagtgacggcgtgccttttgcataatgaacctacgagttactttttccggcaaggttaagcatcttgagatgtgcagccgaagcgaaagcgagtctgaacagggcgtcgagtcggaaggagtagacgcgaaaccaagtgatctacccttggtcaggttgaaggttaggtaacactaactggaggaccgaaccgataagcgttgaaaagcttccggatgaactgagggtgggggtgaaaggctaatcaaacttggagatagctcgtactccccgaaatgcatttaggtgcagccttgtgagttactaatgtgaggtagagcgactgataagatgcgagggcttcaccgcctatcaagtcttgataaactccgaatgcgcattagttctatcacaggagtgagggcatgggtgctaaggtccatgtcctaaaggagaagaatccagaccatcagctaaggtccccaaataaacactaagttgaactaacgaagtcagattgctaagacagctaggatgttggcttggaagcagccattcatttaaagagtgcgtaacagctcactagtcgaggagtttggcgtggataataatcgggcattaagtgttttaccgaagctatgggatcagtaatgatcggtaggggagcattccactctgcgtcgaaggtgaagcgtgagctttgctggagcgtgtggaaaagcaaatgtaggtataagtaacgataaagggggtgagaaaccccctcgccgaaagactaaggtttcctgatcaacgctaatcggatcagggttagtcgggtcctaaggctcagccgaacggtgaggccgatggcagaacaggttaatattcctgtactaccttaaggagtgacgtggagacggaggcgtgacagcgccgcggactgacggaatagtccgttgaagggtgtagatgttgattatcccaggcaaatccgggataagagtcgaacctgatagtatggagcgttcttcggaacaatccaatagtgcgtgtaatcatactcccaagaaaatccgctaaacttaatccttgaggtacccgtaccgcaaacggacacacgtagtcgggttgaatatactaaggcgcttgagtgattcacggttaaggaactaggcaaattgaccctgtaacttcgggataaagggtcccaacgagagttgggcgcagagaataggtccaggcaactgtttaacaaaaacacagggctgtgccaaattgaaagattacgtatacagcctgacacctgcccggtgctggaaggttaagaggagatgtcatcgcaagagaagcattgaattgaagccccagtaaacggcggccgtaactataacggtcctaaggtagcgaaattccttgtcgggtaagttccgacctgcacgaatggtgtaatgatctggacactgtctcaaccgtgagctcagtgaaattgtagtatcggtgaagatgccgattacccgcgatgggacgaaaagaccccgtgaacctttactatagcttaacattgaatttgggtaattgatgtgtaggataggccggagactttgaagcaggtacgccagtatttgtggagtcgctgttgaaatacggccctttgattatttgagttctaactcgtggtacgaggacactgtttggtgggtagtttgactggggtggtcgcctccaaaatagtaacggaggcttctaaaggtgccctcaggacgattggtaaccgtccgcagagtgtaatggcataagggcgcttgactgggagacttacaagtcgatcaggtaggaaactagagcatagtgatccggtgtttccgtatggaagggacatcgctcaaaggataaaaggtactccggggataacaggctgatccctcccaagagctcatatcgacggaggggtttggcacctcgatgtcggctcgtcacatcctggggctggagaaggtcccaagggttgggctgttcgcccattaaagtggcacgcgagctgggttcagaacgtcgtgagacagttcggtctctatctatcgtgggcgtatgaaatttgcgtggctctgacactagtacgagaggaccgtgttggactgaccgctggtttaccagttgtgccgccaggtgcattgctgggtatctaagtcgggattggataagtgctgaaagcatctaagtacgaagccagccacaagattagatttcttagggtcgttaaagacgatgacgttgataggatgcaggtgtaaaggtggtaacatcaaagccgagcattactaattgcccgttcactttctttcggacggtgcggatcgcgatatatacgtttagcttttttaattgacaattgacaaatgacaattgacaattagattaacagatacttgaattttactttttatcatgtcataacttatcatgacagctgcgataattgtcatttgtcaattgtccattgtcaattgaagaaattcaggtggttatagcacgagggttccacctcttcccattccgaacagagaagttaagcctcgtcacgccgatggtactgcgtaacagtgggagagtaggtagccgccatttttagagaagcccttccggtagaaataccagaagggctttattgtttttgtccttctgaaatttgtgacatcatttttaacagcaataatcctcataatacctattaaaaaagtgaatatttactggtaatttgtatgttatgaggatatttatttgtatctttgtcgcccgaattgtaatctaacgatttaaaaaagagagaagctttgggaaagtttgataaatacaaaattgatttgaaaggcatgcaaacagactctgctaagtatgagtttgttttggataacctttacttcgcccacattgatggtcctgaagttcagaaaggaaaagtaaatgttactttgactgtgaaaagaacctctcgtgctttcgaactgagctttcagacagacggtatagtatgggtaccatgcgaccgttgcctggacgaaatggagctacagatcacttcgtctgacaaactgatggtgaagtttggacatgaatatgcagaggaaggcgacaacctgattgtgatccctgaagaagagggagaaatcaacgttgcatggttcatgtatgaattcgttgcactctctatcccaatgaagcatgtgcatgctccgggtaagtgcaacaaagctgttactagcaagttgagcaagcatctcaagacagatgccaatgaagatagcgatgaagtcttcgacacaggtggagatgatatcgtagttgaggaggaaatggaggaacaaattgatccccgttggaatgaattaaaaaaaatattagataataattaaagttttaagaaaatggcacatcctaagagaagacaatcaaaaacaagaacagcaaagagaagaactcatgataaggcagtagctcctacattggctatttgtccgaattgcggagaatggcatgtttatcacactgtatgtggcgcatgtggttactacagaggtaagctcgctatcgaaaaagaagcagctgtataattagtacagtatactcaagacagccgagggggaaaactctccggctgctttaagtattatagtatcgctaatttaaaataggtttgatggaaaaaataaatgcagtaatcacaggagttggaggatatgtacccgattatatcttgactaatgaagagatatcaaaaatggtagataccaacgatgaatggattatgactcgtattggagtaaaggaaagacatattctgaatgaggaaggattaggtagctcatacatggcacgcaaagctgccaagcagttgatgaagaagaccggagccaatcctgacgatattgatttggttattgttgctactactactcctgactatcacttcccttctacagcttctattctttgcgataaactcggactgaaaaacgcatttgctttcgatttgcaggccgcttgttgcggtttcctgtatttgatggaaacagctgctaacttcattcgttcgggaagatataagaaaattatcattgtcggtgccgataagatgtcgtcaatggttaactatacagatcgtgctacatgccctatctttggtgacggtgccgctgcttttatgatggagcccactacggaagatttaggtgttatggattcgatattgagaactgatggtaaaggcctgcctttcctccacatgaaagctggtggttcggtttgtcctccgtcttatttcactgtagacaataaaatgcactatctgcaccaggaaggaagaacagtgttcaaatatgcggtttcaagtatgtcggatgtatcggctgcaattgcagaaaagaatggtctgactaaagatactattaactgggtggttccccaccaggcgaatgtacgtatcattgaagctgtggctcatcgcatggaactcccgatggataaagtgttggtgaacattgagcattatggtaacacaagtgccgctacgcttcctctgtgtatctgggattttgaagataaactaaagaaaggtgataacattatatttacagcattcggcgccggatttacatggggtgcggtttatgtaaaatggggttatgacggaaaaaaggaatcgtaacgtaagttactgaattataacacaaaaaacgcatcctatttcgattcgatgcgtttttttgtctcaaccaataaaataaagagaaatgcataaagcaggttttgtaaacatcgtagggaatccgaatgtcggaaagtcgacattgatgaatgctttggtgggagaacgtatatcaattgctaccttcaaagcgcagactacccgtcaccgaattatgggaatttataatacggatgatatgcagattgttttttctgatactccgggagtattgaaacctaactataagttgcaggagtcgatgctgaacttctcaacctctgcattgacagatgcggatgtactgctttatgtgactgacgtggtggagacgcccgataagaataatgagtttatgggaaaggtgcgtcagatgacggttcctgtcctgttgcttatcaacaaaatagaccttacggatcaggagaagctgatcaaactggtcgaagagtggaaggagttgcttccgcaggctgagattatccctatttccgccgcatccaagtttaatgtagactatgtgatgaagcgtattcaggaactgttgcctgattctcctccttatttcggcaaagatcagtggacggataagcctgcccgtttctttgtgaatgagattatccgtgaaaagattctgctatattatgataaggaaatcccttattcggtggaagtagtagtggaagaatttaaagaggaagcgaaaaaaatacatatccgggcagtgatttatgtggaacgtgattcacaaaaaggaatcattatcggcaagcagggaaaagcattgaaaaaagtagctaccgaagcacgccgggaattggaacgtttctttggaaagacgattttcctggaaacttatgtgaaggttgataaagattggcgtagttcggataaggaactgcggaactttggttatcagttagattaagagtattcatgcgactgggatagtcgtgaaaaacaaggtattgagctatgaataatttagttgcaattgtaggacgccctaatgtgggcaagtctaccttatttaaccgtctgacgaaaactcgtcaggcaattgtgaatgaagaagcgggtacaactcgtgacaggcagtatggcaagtccgaatggctgggccgtgagttctccgtggtagataccggcggatgggtagtgaactctgacgatatctttgaagaggaaatccggaagcaagtattgctggctgtggaagaagcagatgttattctgtttgtagtggatgtgatgaacggagtgactgacctggatatgcaggttgcgactatcttgcgacgtgctaacagcccggtgattatggttgccaacaagacggataataatgaattacaatataacgctcctgagttttataaattaggattgggcgatccgtattgtatctctgctatcaccggaagtggtacaggtgatttgatggacttgatcgtcagcaaattcaataaagagacttcggaaattctggatgatgatattccccgctttgctgtagtaggacgcccgaatgcaggaaaatcctctattgtaaacgcgtttatcggagaagaccgtaacattgtaacggagatcgccggaacaacccgtgactctatttatactcgttacaataaattcggatttgatttttatctggtagatacagccggtatccgtaaaaagaataaggtgaacgaggatttggaatactattcggtagtccgttctattcgttcgattgaaaacgcggatgtctgtattttgatgcttgatgctacaagaggtgttgaaagccaggatttgaatattctttctttgattcagaaaaatcagaaggggctggtagtcgtgattaataagtgggacctgatagaggataaaacggcgaaaatgatgaaggagtttgaagcgactatccgttcacgttttgctccctttgtggatttcccgattatatttgcttctgcattgaccaaacagcgtatcctgaaagtgcttgaagaagcccgtaacgtgtatgaaaaccgtacgacgaagataccgactgcccgtctgaacgaagagatgcttccgttgattgaggcatatccacccccctccaataaaggtaaatatatcaagatcaaatatatcacgcagttgccgaatacacaagtgccttcatttgtatatttcgccaatttgccgcagtatgtgaaggaaccgtacaaacgtttcctggaaaataaaatgcgtgagaagtggaatctgaccggtacaccgatcaatatttatatccgacagaagtaaaaggtatattcgtataaataaaaagaaattgcccggcaatatttcattgccgggcaatttctttttatttatgaggattattcgtctttatttaactggaagtccttacggcgcaaaacgaaactgttacttaagtatttttcacgcacgatcttgttttctgccaattcttccggtgttccctgaaacaggatcttgccttcgaacagcagataagcgcggtcagtgatacttaatgtttcctgcacattgtggtcggtaatcaggataccgatgtttttatccttcagcttccacacaatctgctgaatatcttctactgcgatagggtctactccggcaaacggttcatcgagcataatgaacttcgggtcgatggcaagacaacgggcgatttccgtacgacggcgttcacctccggacaactggttacccttgttcttgcgtaccttctgaaggcggaactcagcgatcagactttcgagcttgtctttttgataatctttgggcttattggtcatttcgagtacagaagcgatattgtcttctacactcatctgacggaatacggaggcttcctgtgcaaggtatccgatacctgtctgcgcccgtttgtatactggaaacttggttatctcaaggtcgtcgaggaagattcgtccttcattaggagtgatcagtcctacggtcatatagaatgaagtcgtcttaccggcaccgttcggtcccagcaaacccacaatttcaccttgcttcacgtcgatggatacatggcttacaacggttcgtttaccgtacttcttaaccaggtcttccgtgcgaagcaccatcttgctttcttccatattctagttattttgcggcaaatgtagtaaaaataagctgaaataatgtacatttgcagacaaatagtgtgagttatgataaaagcattgagaactgtcggacgatatatcatgctgatgggacgtactttttcccgtcccgagcgtatgcgtatgtttttccggcaataccttaacgagatggagcaactgggtgtgaactccatcggcatcgtgttgttgatttcatttttcatcggcgcggtgattactattcagataaaattgaatattgaaagtccatggatgcctcgctggacagtgggatatgtgactcgtgaaattatgttgctggagttctcctcttctattatgtgtttgattctggcgggaaaggtaggctcgaacattgcttcagaactgggaacgatgcgggtgacgcagcagattgacgcacttgaaataatgggtataaattccgccaattatctgatactacccaaaataacggccatggtaactgtgattcctgtattggtgacgtttagtatttttgccggtatcatcggtgctttttgtacctgttggtttgccggtgtgatgaatgcggtcgatctggaatatggattgcagtatatgtttgtcgaatggtttatctgggcgggtatcataaaatcccttttctttgcctttattattgcaagtgtttctgcctttttcggttatacggtagatggtggttccattgctgtaggaaaggcttctacggatgctgtggtaagcagtagtgtgttgattctgtttgcagatttggtattaactaaacttttgatgggatgattgatattagaggactttataaatcatttgaggataaaacggtattgagtgatatcaatgcgtcttttgagaatggaaagacaaacctgattatcggtcagagcggctccggtaaaacggtcttaatgaaatgtatcgtaggcttgcttactcctgaaaaaggagaagtgctgtatgacggacgtaaccttgtcctgatggggaagaaggagaaaaagatgcttcgtaaggagatggggatgattttccagagtgcggcgctttttgactccatgtcggtgctggataatgtaatgttcccgctgaatatgtttagcaacgatacactgcgtgaccgtaccaagcgtgccatgttttgtctggaacgtgtgaatctgaccgaggcgaaagataaatttccgggtgaaatcagtggtgggatgcagaagcgtgtggccattgcccgtgctatcgcattgaatccgcagtacctgttctgtgacgaaccgaactccgggctggaccccaaaacgtcattagttattgacgacttgattcatgacatcactcaggagtataacatgacgactatcatcaatacccatgacatgaattctgtgctgggaatcggtgagaaagtgatttatatttatgaaggacataaagaatgggaagggacgaaagatgatatcttcacttctaccaatgaacggctgaataactttatctttgcttcggacctgcttcgtaaagtgaaggatatggaagtgcagaatatggaaggctgacggaaaagtaaatagaaggacataaaaaaacttctgtcatcatgtggcagaagtttcttttttttcttagctatattagcgtcggcaattaagctctgggtctagcttctttaactaccattgtacggcccatgtactctgcaccgttcaattctgcgattgctttagcagctgctgcatcgtcttccatttcgatgaaagcaaatcctttggatttaccggtttcacgatccataactactttaactgatgatactgctccgtaatcttccatcacttgttgcagatctccttccttaacacggtagttaaggtttccaacataaatgttcataatgaaaatgataaaaaaataaataaatgaataaaactctctggatagatggttactaataaaaagattaaaacgacagagagtttacaaatgcgttttcgaaacagaagtaaaaaccttgtaatcaaatcgagaaactaatggtccatcaatccgcagcaaagaaaagaataatttttggattgaccatctttttcttactttaatttgcaggtaacgagaaaaaaagaaggatgcgtggctagtgaaccgctgcctgtcatgcaattgtcacttgtatattccaaaatagatgcgaaataaatctgcaatgtcttttgaaaattgaaagattagcactaattttgcaccctcgtttgagttagaacaaagtataaatcaaataaataattgtcagaatgaacgtttcattacaaaacattgacaaagtaagcgcacagcttactgtgaagcttgagaaagccgactatcaggaaaaagtagacaaatcgttgaaatcattccgtcagaaggcacaaatgccgggattccgtaaaggaatggttccgatgagcctggttaagaagatgtatggtaaatcagtgattgcagaagaagtgaataaggtactgcaagaagctgtttacaactatattaaagaaaataaggtgaacatgctgggcgaaccgttgcctaacgaagaaaaacagcaggttatcgacttcgatacaatggaagaattcgagtttgtgttcgatatcgctctggcacctgaattcaaagctgaagtaagcgctaaagataaagtggattactatacgatcgaagtatcggatgaaatgatcgaaaaccaggtgaagatgtatactcagcgcactggtaaatacgacaaagtggacgtttatgaagataacgacatgctgaaaggtctgttggctcagctggacgaagaaggtaatacgaaagaaggcggtattcaggtagaaggtgctgtattaatgccttcttatatgaagaacgacgatcagaaagctatctttgctaatgcaaaagtaaatgacgtattggtattcaacccgaatgttgcttacgacggacacgctgctgaacttggttctctgttgaagatcgacaaggaaatcgctaaggatgtgaagtctgacttcagcttccaggtagaagaaatcactcgtttcgtaccgggtgaactgactcaggaagtatttgaccaggcatttggtgaaggtgtagtgaagactgaagaagaattccgcgctaagatcaaagaagaaatcgcagcaagatttgttgctgacagcgattataaattcctgatcgacattcgtaaagtgatgatggacaaagtaggtaagctggaattctctgatgcattgctgaaacgtatcatgttgctgaacaacgaagaaaaaggcgaagaatatgtagctgaaaactacgataagagtatcgaagaactgacttggcacctgatcaaggaacagctggtagaggcaaacgatatcaaagtagagcaggaagatgtgctgaagatggcgaaagaaactaccaaagcacagttcgctcaatacggaatgttgtctgtccccgaagatgtacttgataactatgcacaggaaatgttgaagaagaaagatactattaacaacctggtaagccgcgtagtggaagtaaagttggctgcagctttgaaagctcaggtcactttggagaacaagaacgtttctatggaagaattcaataaaatgtttgaataatcgttcggttgaatagaatataaagtcacagaaacacagagtttttataaaattataactctgtgtttttttgtgtctatgtgttctttttcgtttctttgcacttacgtttataataaatttaattagaaaggaacaataacatggatgattttagaaaatacgcaaccaagcatttaggaatgaatggcatggtgctggacgatgtgattaaatcgcaagccgggtatttgaatccctatattctcgaagagagacagctgaatgtaactcagctcgatgtattctcccgactgatgatggatcgcattatttttctgggtacacaagtagatgactatacggcaaacacgcttcaggcgcaattgctctatttggactctgtagacccgggtaaggatatctctatctatatcaattctccgggtggtagtgtatatgccggattgggtatttacgataccatgcagtttatttcaagtgatgttgctactatctgtacaggtatggctgcttcgatggctgctgtattactggtagccggtgccgaaggcaaacgttctgcattgccgcattcacgtgtgatgattcaccagccgatgggcggtgcgcagggacaggcttcagatattgaaatcacagcccgtgaaattcagaaattgaagaaagaactttatacgatcatcgccgatcattcgcacactgactttgataaggtatgggccgattcggaccgtgattactggatgacagctcaggaagcgaaagaatacggaatgattgatgaagtattgattaaaaaataaaaatggctgattcaaagacaaagaaaaagtgtagcttctgtggtcggtcggagaatgaagtcggattcctgatcacaggaatgaacggctatatctgcgacagctgcgctacccaggcttatgagattactcaggaagcactgggcgaaggcagaaaaagggccggagctaccaaactcaacttaaaagaactgcccaaaccggtagaaataaagaaattcctcgatcagtacgtaatcggacaggatgatgcgaagcgctttctttccgtatcggtttacaaccattataagcgtcttttgcagaaagacagcggtgatgatgtagagattgaaaaatcaaacattatcatggtgggtagtaccggaaccgggaaaacattgctggcacgtactattgccaagttgcttcatgttccgtttacgattgtagacgctacggtattgacggaagccggttatgtcggtgaagatattgaaagcattctgacccgtttgcttcaggtggcagactataatgtgccggaggctgagcaaggaattgtgtttatcgatgagatagacaagattgcccgcaaaggagacaatccttctatcactcgcgacgtaagtggagaaggggtgcagcaaggtttgctgaaattgcttgagggatcggtggtgaacgttcctccccagggaggccgtaagcatcccgaccagaaaatgattccggtgaataccaagaacattctctttatctgtggtggtgctttcgatggtattgaaaagaaaatcgcccaacggctgaatacgcatgtggtaggatataccgcatcgcaaaaaacggcagtgatcgataagaataatatgatgcagtacattgctcctcaggatttgaagtcattcggactgattcccgaaattatcggtcgtcttccggtgctgacttatctgaacccgctggaccgcaatgcactccgtgctattcttaccgaaccgaaaaactctatcatcaagcaatatatcaagttgtttgaaatggatggtatcaagctgacatttgaagattctgttttcgaatatatcgttgacaaggctgtagaatataagttaggtgcccgcgggttgcgttctattgtggaaacaatcatgatggatgtcatgtttgaaatcccttcagagagcaaaaaagagtataaggtaacgctggattatgcaaaacaacagctggaaaaagcgaatatggcaaggctgcaaactgcttaatatcaaatagtaaggctattgaaaatgattgtttctgttttttcttgaaaatattagtcgtattttgcttggtaattacgaagttgtttataactttgtttggctctcttgcaatggagggctttacttaaagttaaaccatgaactgaataaaacaacctaagttaagatggcagggaagattaatttaacagatgaactgaaaaagtatttcggatttaataagttcaagggaaaccaggaagcaatcattcagaacttgcttgatggtaaagatacctttgtgctaatgcctaccggtggcggaaaatctttatgctatcagttaccttcgctcttgatggaaggtacggcaattgttatttctccgctcattgcgttgatgaagaatcaggtggatgcaatgcgcaatttcagtgaagaggatggcatcgcccattttataaattcttcattaaataaaggcgcaatagaccaagtaaggtctgacatccttgccggaaaaacaaaattgctatatgtggctcctgagtcattgacaaaggaagaaaacgtagattttttgcgttcggtgaaaatatcgttctatgcggtagacgaagctcattgtatttccgaatgggggcatgacttccgtccggagtatcggcgaattcgtccgatcattaacgaaatagggaaagctcccttgattgcgcttactgcaacagcaacaccgaaggtacagcacgatatccagaaaaatctggggatggtggatgcacaggttttcaaatcttcgttcaaccgtccgaacctttattatgaggtacgcgcaaagactaacaatattgataaagatatcatcaagttcatcaagaacaactcggaaaagtcgggcattatctattgcctgagccggaagaaagtagaggaacttgctgaaattcttcaggcaaacggaataaacgcgcgtccttatcatgcaggtatggactcaatgacgagaacgaaaaaccaggatgatttcctgatggaaaaggtggaagtgattgtggctaccatcgcttttggtatgggaatcgacaagccggatgtacggtttgtgatccattatgatatcccgaagagtctggaagggtattatcaggagactggacgtgccggtagagacggtggcgaaggccagtgcctgaccttttatacaaacaaagacttgcagaaactggaaaagttcatgcaaggaaaacctgtggcagaacaggaaattggcaagcagcttctgttggaaaccgctgcttatgccgaatcttccgtgtgccggcgcaagacattgctgcattatttcggtgaagaatatacggaagaaaattgtggaaattgtgacaactgtttaaaccctaaaaaacaagtggaggctcaagagttattatgtgccgtgattgaagcgattatcgcggtgaaagaaaattttaaggcagattatatcatagacatactacaaggtagagaaacgtcggaagtacaggctcacctacacgaagacctcgaagtgttcggttcgggtatgggcgaagaagacaaaacatggaatgcagtgatccggcaagctttgattggcggttacttgagcaaagatgtggagaattatggtctcttgaaagtgacggaagaggggcataagttcctgaagaagccaaaatcattcaagattactgaagataatgattttgaagaaacggaagaagaagtacctgcacgtggcggtggctcttgtgcggtagacccggctctttattcaatgctgaaggatctacggaagaagctgtccaagaaactggaagttcctccttatgtcattttccaggatccgtctttggaagcaatggctaccatctacccggtgacattggatgaactgcagaatattccgggcgtaggtgccggaaaggcgaaacgctatggtgaagagttctgtaaactgatcaaacgtcattgcgaagagaatgaaatcgaacgtccggaagatttacgtgtacgtacggttgccaataagtcaaagatgaaggtggctatcattcaggctatcgaccgtaaagtggcgctggacgatatcgctctttccaaaggaatcgagtttggtgaactgctggatgaagtggaagcaatcgtttactccggaactaaactgaatattgactacttcctggaagaaattatggatgaagatcatatgctcgatatctatgattacttcaaggaatctacgacagacaagattgatgatgctcttgacgaactgggcgatgaatttaccgaagaggaagtccgactggtgagaatcaagttcatctctgaaatggctaattaaaaaagcgaaaaaaataggcgtgcaggtatgctgttttgaataaaaactgtatatttgcacgcaataaatttttaaacgcacagccctatgtcatttattgctgataagattgtaatggatgggttaacttacgatgacgtattgttgatccccgcttattctgaagttttaccgcgcactgtcgatctctcgacaaagttttcaagaaacattgagttaaaaataccttttgtgacggctgccatggatacggttaccgaagcgaaaatggctattgccattgcccgtgaaggtggtatcggtgtgattcacaaaaatatgtctattgaggagcaggcaagacaagttgccattgtaaagcgtgctgaaaatggtatgatttacgatcctgttactatcaagagaggttctactgtcagtgacgctttgggaattatggctgaatataaaatcggtggtattcctgtagtggatgatgaaggttatctggtaggtatcgttactaacagagatttgcgtttcgaaagagacatgacaaagcatattgatcttgttatgactcctaaagaaagattggttactaccaatcagtctaccgatctggaatctgctgcacagattcttcaaaaacataagattgaaaagttgccgattgtaggaatggatggcaaactgatcggtcttgttacatataaagatattacaaaggcaaaagataaaccgatggcttgtaaagatgccaaaggtcgtctgcgggtagctgcaggtgtcggcgttactgctgatacgctggatcgtatgcaggcattggtggatgccggtgcagatgctatcgtaatcgatacggctcacggacattctatgtacgttattgagaaactgaaagaagcaaagaaacgcttcccgaatattgatatcgtggtaggtaacattgctaccggagaagctgcgaaggctttggcagaagctggtgctgatgctgtgaaagtaggtatcggtccgggttctatctgtacgactcgtgttgttgcaggtgtaggtgttcctcagttgtcggctgtatatgatgtagccaaggcactgaaaggtacaggtgttcctctgattgctgatggtggtttgcgctattccggtgatgtggtaaaagcattggctgccggcggatattgtgtgatgatcggatcattggttgccggaacagaagagtctccgggtgatactatcatctttaacggacgtaaattcaaatcatatcgcggtatgggttcattggaagcaatggagaatggctctaaagaccgttatttccagagtggaactgccgacgtgaagaaattggttccggaaggtattgctgctcgtgttccttataaaggtacactttatgaagtagtttatcagttgtctggtggtcttcgtgcaggtatgggatattgcggcgctgctaatattgaaaaacttcatgatgcgaagtttactcgtattacaaatgccggagtgatggaaagtcacccgcatgatgtgacgattaccagtgaatcacctaactatagccgtccggaataatttatataaacggtaaacgattaacggtgaacggtgaacaggctgtatggcatatgttcgttgttcaccgtttgtcgtttttaaataaaaatcaatgatgaaaagaaatctgcttttaggatggataagtctcttcggagtattagctttcgctcaggaagatcccgtagtgatgcggattaatgggaaagaaatacctcgttcggagtttgaatactcctatcgccggcatacggacggtaatggtacgaaattgtctcctagagaatatgcggagcttttcattctgtctaagttgaaagtggaagcggccagagcggccggactcgacactacttcggcttttcgcaagcaacaggaggcttatcggacaaatttgctgaggtcataccttctggatgatcaggaaatggatggcaatgcccgtattctatatcagaagatgaaggaaaatgtacgtggcggacaagtgcagatacggcaaatttacaaatatctgcctcagaccattacatcccggcatttacaggaggaacaggctcgcatggactctatttatcaggtgatacaaaatcagccgagtgtggattttgcccgtttggtagatcggttttcggatgataaacgttgtcggtggatagaaagtttacagacaacatcggagtttgaggaggctgctttctctttggcaaaaggtgaaatatccaaacctttttttactccggaggggattcatattctgaaagtcatagatcgaaaggaagtgcctgcatatgaagtcgttagtgacagtcttctgaatcgtttaaggcgtcagccgttggataaaggaacggaagccatcgtagagcaattgaaaaaggaataccagtatattcccaatatggagtctttggaagaagtattgcagaaaggtggaacggaacgggttttgtttaccatcaacgggcaggcatatacaggagaaatgtttaagcggtttgcttcatcccatcctcaggctgtaaaacggcagttgaatggctttatagcaaaatctctgctggattatgagagtcagcatatggaaagaaaacatccggaacttcgttatactttgcaggaatatgctgagaaatgtctggctgaggaaatcgtgcatcagaaagtagatttaccggctgttaacgaccgggcgggattggctacttattttaagtttcattcatcggattaccgatgggagcatccccgatacaaaggagtagtgttgcattgtgcagataaaaagactgctaaacaggctaaaaagctactgaaaaaagttccggagaatgaatgggaggatatgcttcgcaaaacatttaatacatccggtgctgaaacaattaaaattgaacagggtgtttttgccgacggagataataaatatatagataaattggtctttaagaagggcgcttttgaccctgtagtgtcttatccttttactatcgctgtaggcaaaaaacagaagggaccagaggattacagagaggtaattgatcaggtgagaaaagattatagaagctatcttaacgcatattgggagcaggaattgagggaatctggtaaggttgaaataaaccaagaggttttaaaaacagttaataataactgatgtaaccgattattcactatcttcgtaccttaaataagtagatttgaattgacaatgcgaatattagtcctcttactaattacccttctctgttgtggagcgtgcaaagagcagtacgaccacaaaggcaagactgcattggtggaggtagatggtaactttttgtataaagaagatttgatgtctgtactaccggtcggattgtcaaaagatgatagcattcttttcgccgagcattacattcgtagctgggcggaggagattttgttgtatgaaaaagctgcgaataatattccggataatgtggatgtagataagctggtggagaattaccggaaagctttgattatgcatacctatcagcaggaattgataaaccaaaaactgacgaatgatatttcggaacaggaaatagcggattattatgagaaaaacaaggaattgtttaaactggaatctccgctgatcaagggattgtttattaaagtaccgttgacggcacctcagctgaacaatgttcgcagatggtacaagacggaaaaacaggatgctgtggaaagtctggaaaaatatagtttgcagaatgcggtgaagtatgaatacttttacaataaatgggttccggttacggatgttctggacctgattccattgaaagaggcgtcaccggagcaatatgtagacaagcaccgacatgtggaactgaaagatacggcattttactatttcctcaatgtgagcgattatcgcggggcaggtgaagagaaaccgtatgagtttgcccggtcggaagtgaaggatttactggtcaatcagaaacgggtgaactttatggaacaagtgaagaatgatctgtatcagcaggctgtaaacaagaagaagattatatacaattattaaatacaaagaatgaagaagtttgtgaactttagatttattgttacccttgtcctggcagtatttgccaacgtggtaacttatgcacaggacaatgtaattgatgaggtagtttgggtagtaggtgacgaagctattttgaaatcagatgtagaagaggcccgtatggatgccttgtacaatggacgcagatttgaaggcgatccttattgtgtaatacccgaagaaatcgctgtgcagaagttattcctgcaccaggcaaagttggatagtatcgaagtttccgaagcggaaatcattcagcgtgtagatatgatgaccaatatgtatatccagcagattggttctaaggagaaaatggaggaatacttcaataagactgctactcaaattcgtgaaacgttgcgcgaaaatgcccgtgatggactgacagtacagaagatgcagcagaaactggtaggagatatcaaggtaactccggcagaagtacgccgatatttcaaggatcttcctcaggacagtatcccttatattccgactcaggtagaggtgcagattattacgctgcaacctaaaattcctattgcggaaattgaagatgtaaagagacgtctgcgcgattatacagaccgtgtgacaaagggtgaaattgatttttctacattggcacgtctgtattccgaagataaggcttctgctatcaaaggtggtgaacttgattttatgggacgtggtatgctggatccggcttatgccaatgtagcattcagtcttcaggacccgaagaaagtatccaagattgtagaatctgaatttggttatcatattatccagcttatcgagaaacgtggcgaccgtgtgaatacccgtcacattctgttgcgtccgaaagtatctgaaaaggagttgactgaggcttgtgcccgtttggattctattggcgatgatatccgtcagaataagtttacatttgatgaggctgcctctgtgatttcacaggataaggatactcgtaataatcacggtcttatggtgaatacgaatgagcgtacaggtatcactacttctaagttccagatgcaggatttgcctcaggatgttgcgaaagtggtggataagatgaatgtaggcgaaatttccagagcctttacgatgattaacgagaaggatggaaaagaagtttgtgccattgtaaaactgaaagcaaagatcaacggtcataaagctaccattgcagaagactatcaggacctgaaagaaatcgtgatggataagcgccgggaagaaatgttgcagaagtggattctgaacaaacaaaaacatacgtatgtacgtattgacccgaattggcagaagtgtgacttcaagtatccgggttgggtaaggaacgattgatgtttaaacagcttgactttatatgctgaaacaaaacaaaaaagataaacagcaagacgggcatagatggcttcttataggctttctatgcctgtttgccgtatgccttgtggcgcaggtgaagcccaccggacagactaaaaaggctgagactccggctgcgaaaactccaaatggaacgaagcaaactgataaagatatcaagaaagagcccgaaaataagaagacgaaagtatatttgcttcatgccaatcagggacaggccgacaagcttgcccgaccggatgttcaggtactgattgggaatgtaaagctgcgtcacgacagtatgtatatgttttgtgacagtgctttgatttacgagaaaaccaattcggtagaagcattcagcaatgtacgtatggagcagggggataccttgtttatttacggtgattatctttactacgacgggatgacacagattgcgcagattcgtgagaacgtaaagatgatcaaccggaacacgacgcttctgaccgatagtctgaattatgaccgtctttatgatctcggttattatttcgagggcggtactttgatggatgaagagaatgtgttgacctcggattggggagaatacagtcccgctaccaaacagtcggtattcaatcatgatgtgaaattggtgaatcccaagtttgtcctgacgtcggatacactgaaatataatactttttccaagattgctaccattctcggtccttcgaatatcgtaagtgacaataatcacatctattcggaacgaggcttctataatacactcagcgaacaggctgaattgttggaccgttctatcctgacgaatgagggaaagaagttgattggtgacagtttgttttatgaccggaaagtgggatacggtgaagcgttcgataatatacgaatgacggataccattaacaagaatatgttgaccggcgattattgtttctataacgaattgaccgactctgcttttgctaccaaacgtgcagttgctattgactattcacaaggagacagtctctttatgcatggagatacgttgcagcttatttcctataatctgaatacggactctgttttccgcctgatgaaagcttatcataaggtacgtatgtaccggacggatgtacagggagtttgtgactcactggtttataattcaaaagactcttgtctgaccatgtatatcgatccgattctttggaatgaaggtcagcaactgcttggcgaggagatcaagatttatatgaatgacagtaccattaactgggcccacattatcaatcaggcactgacggtggagatgaaagattctgttcattataaccaagtgtccggtaaagagatgaaagcctatttcgaaaatggtgatatgcgtcatattgaagtgataggtaatgtgatgaccgctttctacccggaagaaaaagacagtacgatgaccggatttaataatatggaggggagtgtgctccatctttatatgaaagagaagaagatggaaaaagggatgttcgtaggtaagtccaacggaacattatatccgatggatcagatccctcccgacaagttgcggctatctacatttgcctggtttgactatgtccgccctttaaataaagaagatatattcaactggagaggcaagaaggaaggagagacactgaaaccaaccaccgaccggaagccaaagacagataagcgaagtttaattaatatgaagtaatatgggaatgtttttcaattcgatgagaaaacctcgaggctttaatcatcaatacatttacgtaaacgagcggaaagaaaagcttgagaagatggaggagaaggcgaaacgcgagttgggaatgcttccggataaagaattcagtcccgaagatatccgtggtaagtttgtcgaaggtacgacgcacctgaagcgcagaaaggcaagtggccgtaagcctgtatcttttggaatcatattgattatcatagctttccttttatatttgtggcattatttagcgacgggaagctggtcattttaactactaaataaactatgagcgatataattcatttgttgcctgattcggtagctaatcagattgctgccggtgaagtgatacaacgtccggcatctgttattaaagagctagtggagaatgcgatcgatgcagatgctcaaaatatacatgtgttagttacggatgccggtaagacctgcatccagattatagacgatggaaagggaatgtccgaaacggacgcgcgactttcctttgaacgccatgcgacttctaagattcgggaagcagcggatttgtttgctttgcgtacgatggggtttcgtggagaagcactggcttccattgcagctgtggcgcaggttgaactgaaaacacggttggaatcggaagaactgggaacaaaactggtgattgcaggctccaaagtcgaaagtcaggaagctgtttcctgttccaagggaagtaacttctctgtgaagaatctgttcttcaacgtgcccgcccgtcgcaagttcctgaaagctaattcaacagaactaagtaatattctggcagagtttgaacgtattgctttggttcatcccgaagtagccttttcgctttacagcaatgattccgaactgtttaatctgcctgtatctcctttgcggcaacgtattcttgctatcttcggcaagaagctgaatcaacagttgctgaatatagaggtgaatactacgatggtgaaaatctcaggctacatagcgaagccggaaactgcccgtaagaaaggtgctcaccaatatttctttgtcaacgggcgttatatgcgccatccttattttcataaggcagtgatggaggcttatgaacagttgattcccgttggcgagcaagtttcctactttatttattttgaagtggatccggctaatatcgatgtgaatattcatcccactaagacagaaatcaagtttgagaatgaacaggctatctggcaaatactttcggcatcagtaaaggagtcgttgggcaagttcagcgccattccttccattgatttcgatacggaagatatgccggatattcctgcatttgagcagaacctgcctcctgcacctccgaagattcattataattcggatttcaatccgttcaaagtatcttccggtggaagtggcggcggatcatatagccgtccgaaggtggaatgggaaggactgtatggtggattgaccaaggcaagtaagatgaatgagcctcagcaggaaccggaaatggattgggaaaattctcctttcgaggaagaaccgatggttgctgaagagaaaactatttcggcggtatctgccgcttcctccactttctcatcggcttcctctactttatatgccaatgaatcggtgattgagaaagggaatctgcatttgcagttcaaaggtcgttttattctgacttcggtgaaatcaggattgatgttgatcgaccagcatcgtgcgcatatccgtgtactttttgatcggtatatggtgcagataaaacaaaaacaaggtgtttcgcagggagtgcttttccccgagatattacagctgcctgcttcagaagcggctgtcctgcaaggaatcatggatgatttgtcggcggtaggtttcgatctgagtgatttgggtggcggtagttatgccatcaatggcattccttcggggatagaaggattgaatccggttgagttggtacggaatatgctacatacagctatggaaaaagggaatgatgtgaaggaggaaatccagaatatcttagctttaacactggcacgtgcggcggctattgtatatggtcaggtattgagtaatgaggaaatggtaagtcttgtagacagtctttttgcctgtccttcaccaaattacactccggatggcaaaacagtcttgacaacaatcaaggaagaggacatcgagaaattattcaaataaaacaaataaaatcatcatttcttaaaaccttttagttcagttcgtgttatttaaatagttcaacaaagaaaagattataataaccacttaactattaggtatatgaaaaagattctaatgttgctggcttttgccggcgttgcgtctgtcgcttctgcgcagcaaaccgtgactgtaactgaatacgaggttattcaggtacaagataaacatcaagtaataactaacccattctggagcaactggttcttctctgtaggaggcggtgcacaggtattatttggtaataacgaccatatcggaaaattcagagatcgtattgctccgacattgaatgtgtcagttggtaaatgggtaacacccggtttcgggttacgtatgcaatatagcggactgcaatccaaaggattcaccaccaatgaatctgcaaattatgtagtcggtggcccgagagaagatggctcctacaaacagagatgggactatatgaatcttcatggcgacttgctgattaatctgaatgcacttttcggtggttacaatccggatcgcgtatatgagattattccgtatatcggtgccggttgggctcattcttattctaagcctcatacaaacgctgctaccttcaatgcaggtattatcaaccgtttccgtttgtcaaacgctgtagatttgaaccttgaactgagtgcaacagggttggaaggtaaatttgatggtgaacacggtggcaaacccgattatgatggtatcttaggtgctactctcggtgtgacttattacttcccgacccgtggattccaacgtcctgttccacagattatctccgaactggaattgagacagatgcgtgatcagatgaatgctatggcagccgcaaatatgcagttgcagcaacagttagccaatgcacagcagcctgtagtggaagaagctgaagaagtcgttgtaacagatgccaacattgcaccgcgtactgtattcttcaagatcggttcagacaaattgtctccacaagaagaaatgaacttgtcatatcttgccagcaagatgaaagaattcccgaacatgacctatacaatcaacggatatgcagactctgcaaccggtactccttctatcaaccagaagttaagtctggaacgtgcacaagctgtaaaggacctgttggttaagaaatatggcatctctgcagacagactgtctgttgcagcaggtggtggtgtcgacaagttcggtcaaccgattctgaatcgtgtggtattggtagaatcagctcaataatacatttgatattgtaatatagatacggctgttaagtgggccgtatttatgaaaggaaagacttgctcaggtaaagatatccctcggatactttacttgggcgagtctttttgtttccaatgatttgcatatcctataattttttgcgaatattgcaatcaaatgcattggtcttagacataagtttcttacttttgaacaaggattccggtttttatgattgttactatgaaatgtagataccttctatctttagtctttttattgcatatatgggtatgcaagagtaatgttatagataatagtgtctatgattatggtcttacgtttctggctcattctaccaatcaggatcagcggaccaatctggatcttactcctgcggcttctttgtcttttcccgaggacggtttctcggtgggattcgatataaagttgagaaatgaactgtatacttatggttatgttgtacgggtcatagcagatgattcttcctgctttgattttatctcctacctgctttattcccgatttaatattgtattgactgacaaagaccgggtgatcaagaatacggagattgcagattcggtaaagattgtagcagacagatggatacacgtcgatctgcaatttaccaaagaccggattcatattgctgcagacggtatccaggcggaaatcaatcattccctgagcaactttaaggatatcaagatctatttcggaggcagcaagcatccccgtttcttctctacagatgtacctcctatgaccattcgtaatatagaacttgctgatattcaaggtaaactgctttataaatgggaattggctgctcatgataaagatgtgacttacgatagtgtcagaaataaacaggcttttgtacgtaatggcgtctgggagatagataaacatactaaatgggcggcattagcttcgttgaatgtgcaccatattaatccgcaggtggcttatgacgatgtgtcgggacgttttttcatagcaggaggccgtcagttatttgtttacgatgtgaaggcgaatcgtattgattcgattgcttataaaggacatccttatataggagcttccagccagattatttttgatgccaaacgaaacaggctcttgtcttatacaccggatttcaacgatttgaatgtctatgagtttgaccggaaatgctggacattagaaactccggtaatgattgatacccgccagcatcataatcgtattatcaatcagaaaagagatgaactgattgtttttggtggctatggtaatcaccgctataattcacagttgagcagaataaacctgtctgatccgcaggggtggtcgatcagttcccttgattcctgtctgtttccccgctatttaagtgcgatgggggcggagaatgaggactacttattgatcatgggtggttatggcaatcagtcgggtaagcaggaagaatctccgggaaacttttatgatctttaccggttgaatttgaaaacaggtaaatgcgctaagttatgggagtttgtgaatgacaggcagcactttactttcggtaattcaatgattgtcgatacaccgtcgaatagtgtatatgctttgacatataataatgaccggtataatacttttgtttatttgagccggtttgatatacagaccagacaaccggttcaggaagtgatgagtgattccattgtttataacttcctcgatattcattcttattgtgatatgtttttgcatagagagacatcttctatttatgctgtggtgttgcaggaaaaggagcccggaatatctaaagtcgaattttataaactggcatttccacctttgtccaaggaaggtattttgcctcatcagactggcggaatgaagccggtgatattgatatccggtattttggcaggactactgtgcctgataggaggaagtatatggttattgcatagtaagagaaagagaaaagtgaatgtgtcagtcggtccggttgctacggaagaagtaaaagacagattggtcgaagaagaaccgactgaacaaaaagtatcttcggttttattactgggcggattccagatatttgataagcaaggcggtaacatcacgggagattttacgcctactcttaagcaattattcttgtttttactgctgaataccattaagaacggaaagggaacgacttctcaatgcctggatgaaactttctggttcgatatgagtaagtccagtgcatcgaataacagaaacgtgaatatcagaaagctaaggctgatcattgagaaaatcggagatatcaatattgccaataagaacggctattggtatctgaatctggggaaagacgtgacctgcgattatcaggaagtgatgagattgctggatcagataaaagataaagataccattacggataaaaagataatcaataaaatcatatccctggcgagtgccggcgcattgctccctaacgtcagtgccgaatggattgacgaatataagtcagcctactacgttctgttgacggaaatactgctttctgtggtcaaccgtcccgatataaaagaagattccaggcttttgctgaaaatatcagatgtaattctgcttgttgataatatagacgaagacgctatccgcactaaatgcagagtcttgtatcagatggggcagaaaggtttgtccaagcaaagtttcgataagttctgtattgaatatgaacgtttactgaatgccaagcctgatttctcttatgatgatattataaattcactctaaattaatcctctattaataattttccgctacttcctgttggtcggtggcggagcctgtcctcatcggtaccggaaataggtctcatcggtacccgaaataaatccttgcggagtaaggcactcattataccatcaaataataattgtttttttatcatgaaaacatcattgataactagatgcttatgcgaaaaggatgaaattctttatcgctattaatctaaaattaatatggcattaaggactgtaattctatatttgcttcagaaacggatgggatatcctccactatgtttctgatgacttgagcggatcaactataaccttataaaatgatggaaatatgaaaaacgacacttcttaattactgcttggacttacttgtcagagaaagttttcttgagatgaaaacggtttgaatcaattaatgttaatctataaattatgaaaacaggaaagagcaaagatcatttgcaaagagtttttttaaggttcctttatttgataatggggagcatcctttctttggattctgttatggcgcaggaaaacctgaaagtttccgggcaggtgacagacaataaaggagaagccattatcggagcctcagtgaaagttctgaaaacgggtacggggactatttctgatatggatggtaagtttactatccaggttcctgtgggagcggaactggagataggatatgtcggctataatccgaagagagtgaaagtggtgaataaaaacttcgtaacggtagtccttgaggagaatgtggtagcattgggcgatgtagttgttgtcggatatggcattcagaaaaaggaaagtctgacaggagctatcggaaacctgaaagtagatgatatcgtaaagaccaaggcacctagtttggcacaggccattcagggaaaagttgccggtctgcggatcagacaggagaatggagagccgggtaagttcagttccaatatcaatgtccgtggcttcggaactcctttgtttgtgattgacggagtggtgagagacggttccagcgaatttcaacggctgaatccggaagatattgaaagcatatcttttctgaaagatgctactgcctctatctatggtatgaattcggcgaatggtgccgtgattgttaccaccaagaaaggggctacaggcaaaccgcgtattacgttgaacgccaatgtcggcattacttctcctaccaatgtgccggagatggccaacgccggacaatatatgaccatgcgaaatgaggcggaaatcaatgcaggcagaccggcttatatcacaaaggacgaattgaccaaatggcagcaaggtgctcccggttatgagagtgtagacttgtatgatgccgttttcaataagcacgccacacagttccagacgactctgtccctggaaggtggtaccgacaaagtaagttattacggtagtttcggttatgccaccgataacagcttgttgaagaataacgcattgacttatgataaatatacattccgttccaatgtcagtctgaagattaccaaagacctgacagccagtatcaatcttggcggacgttatgataccaccaaccgtccctggtttcctttctatgatatatttaagagtacgcgtgtaaatccgcctactacttctatctatgccaatgacaatccggattattataataacttctcttatgtccctaatccggcggctatgatcgatgccgattataccggaagcgctaaagagcggaataagaacttgcagacacagtttgcattagagtataatattccttatgtaaaggggctgaaggtgaaaggtacttttatctacgattacaataactacggatataaggcaacgcggaaaggttttaagacatatacctatggcgaatatacgggcgagtatacggcggcagatgccaactatccggctttactccaggataatcgcagagaatcggaacgggtggatatgcagttccagacaaactataacagaacgttcggcaaccataccatcggagctacttatgtcttcgaaagacgcgaagagaaagcaaactggatgaatggtgagcgcaagtttgactttttcacaatcggtgaactggacaatgcacgcgaatctgaccagaaagtatccggttcctcggaacaccaggcttatctttctcatatcgggcgtctgacctatgattataaaggcaaatatctggcagagcttgcttgcagatacgacggttcttatcgatatgctccgggcagcagatgggcattctttccgtccgcttccgtaggatggaggatttcggaagagagctttatcaaagacaacttcaagtttgtcgataatctgaaacttcgtttctctgccggtcgttcggggcaagatgccggtgatccgttccaatacttctccggttacacgttgaacagtggcggatatgtattcagccagggaaattataccaatggagtagcttctcctgtgatgatcaataagaatctgacctggattaaagtgaatatgtataatattggtattgacttttcaatctttaaccggctgatcgcagtagagtttgatatttatcagcgtgaccgcagcggcctgttggccgaccgttacggttctcttcccaatacgttcggttccaagttgccacaggaaaacctgaacggcgaccgtacgaggggtattgaatttacattgactcataccaacaaaatcggtgatttccactacagtgtatccggtaactttaacttggcgcgtacccaacgccgttatatagagagcggtccttacaagagcagtatggaaagatggagaaaccagtcatccaaccgctggggagattttatctgggggtatcagacggacggacgtttccagaactttgacgagattaatacatatccgattcagaatggggataacggaaattccaaggaacttcccggtgactacatcctgaaagacgtaaacggtgacggagtggtgaatgatctggacaagacccctttattctggtccggcagcccgttgattcactatggtttcaatgtggaagcatcctggaagaacttcgacttctatgctctttttcaaggttctgccctgtacacggtgcagtttgacgaggtatacgcaaagatgctctgtttcaagggtggcaatacccccgaatacttctacgaccgttggcatctgtccgacccgtatgatgcgaacagtgaatggataccgggagaatggccggccatccgtctggagcaggacatgggatcgttctatacgagggattcgcagatatggcgtaagaacgcttcttatctgagactgaaaacaattgagatcggctacaccttcagtccccgactgatgcataaactgggtatcggtagtttaagaatctatgcgaacggaaataacctgtttactgtctgtgacccgtttgtaaaggcattcgatccggaaaagattgaaggagactatagtgccggcttgaattatcctctgaataagagctttaactttggattgaccttgaacttttaaagaagatgattatgaaaatatatagttatttattattgggagctatgttcctgctgggcggatgtagcgatttgcttgatatcgatccgaagaataaaattccggcggatgaattgttctctactccggaaggagtacaggcacatatggccaatctgtacggtcgtttgcctatcgaagattttacctattcaccgaatcgcggcttcaatgtgggagtcggtacggatgtgaataatgccggttttatggctgctcatttctgtgatgaggctatccatccggagtacaatgactttggagaagagtggttcgattattgggaagacggttataaactcattcgtgatttaaacagtctgttggttactattcctacattgaccagtattaccgaacagcaaaagaatgagatcaatgcggaaactcatttcctgagagcttatacctattttgccttagccaaaagatacggtggggtacctatcattaaagaaccgcaggagtataacggtaatatcgaagaactgcgtgtccccagaaatacggagaaagatacttgggactttgtcttggaagaatgtgaccaggcagtatcgctttttggagatgcgaatgaaaatgatgtgctgagagcgaacaaatgggtagcattggcactgaagtcaagagcagctctgtatgcagcttccgttgccaagtttactcatcagccttatgtctctttctctggtccggctgttgaccagaagctggtaggtatagaagttatatcggctgatcattattatgatgaatgtatatcagcttcacaggaaatcatgaatagtggtaagttcggtctttacaaaccttcccccgctactccggaagaagcgacaaccaactatcaaaagttatttgaacaacctttccaatgtctggacggattgaaagagcctatcttcatgaaggcctatgctgcaaataccattctggcacataactatgatgtctggttcagcccccgtcagatgatcctcgacccgaatctctatcccggtcgtatgaatccgacactggattttgtcgactctttcgaagattatacggatgacggaaccggaacacccaagccgatcagcactcgtgtggatggaaatgaaagtgattataatggatttaacttatccacccgatacctgtctttcccgatagataaaccttaccaggcatttgccggtcgtgatgcccgtttgagtgccatggtgttattcccgggacagaacttcggaagtacgaagatcattatccagggtggtctggtgaaagctgacggttccggttatcattataggactcaggcttcggagaagggacaggatggtctgatctattatacttacggagcggagaaaagcacggaatattcaggattcgatccgactttgggacattatacccgcagcggattcctgtttaagaagttcttgcagatagaaagtccggttgagcaggcatggagtaaaggtacacagccttggatcgatttccgttatggggaaattcttctcaactatgcagaagctgttatcgaaaagacaacctctacttctgctgaaaaacaggctgcacaagacgctttgaatgcggtccgcaaaagagcggctcacaaagatgacattgcattgactcaggcgaatgttcgcaaagaacgttttgtcgagctggcatttgaaaacaaacgcagatgggatttgtcgcgctggagaactttccataaggaatttgaaaaccgggtgagaaagggacttgtacctttccttgacctgcggacaaatcctgcgcattatgtatttgtacgtgtcaatccgttgggcattgaatcaaagacctttgattatagctggtattataagagtattccgggtacgggggctaatggtctggtacagaatccttaattagtatattctaaaatatagattagatatgaaaaagcttctatttttattatgcgttgtagtagcaggcagtatgttttactcttgtgaaaaagataatctcgaagggccggatgcaatctttgccggcgaactgagagaccggaagaccggagaactcattcaacaggagatatcggacggttcccgcgtttatttcatcgaacaggggtggggagataatcctcctgttcagaatatggtcgttaaaaaagacggaacgttttataacggtatgattttctccggtgactataaaatcatcctgaatcgtgggaactacgttcctttggatactctggatatgaaaataaagccgggaaagaattatcaggtcttcgaagtgaattcttatctgcggatcattgaaccggaaatatctgtgatcggaagaaaggtagtggcgaaattcaaactggagcaggtgaccagtaacgaggtctatcgtatttcgttgtttgcacactctcacatcgatgtatccaacaaactgaatattgtcaaccggacagaagaactaaaccgttccattactgatggtgaggctttcgaattgtctatcaatctggaagactacacttccacgctggttccgggcaagagttattatttccggatcggtgcacagtctcacggaagtgagacaaagtacaattattcggcatctgtacagttggatatttagcataaaaacggaaaagccatgagaaagtatttacagttggtattccttgcggtctctgtcttttgttcagagatattgttggcagaatctcgtgatccggtccggatactggatttgagaacgctcaatgaacttgatctgaaagaacaggagaaggcggagcaactatgggacattatgcatacgacagctaccttgcaaggcattgtgaatcggaatagtccgagattgtacattcgctatgtcaagaacgggcagggagagaatgtcgatgattattggtggaataaataccgtcaggcaggacagtggctggcgggacgtgatacgatagcttacacggaactgtcggatgtcgtgaccgttttcagaaaagaaatacgcggagtggttgtttatgactcaaaagtagcatctaccagtaatattgcttcatctgtggcaggaatcgagaatctgatagctgtgcgctatgacatatctcccaatagtctctatacccgtttggtactgcaaggaccgaagctggctgtgaaatgctggctggtgaacaaagatggttcttctcttttcacgggcaaaggaaggattgccggaaccggtcaaccttcgacaggatctctgaaaatcgatccctatgtatggtttatagagaaatacctgaagaaagggttatgcaatacggagtacgccgcttattacatcgaccagttctggcgtaccgatcctacccggacggtaacgaaccatcaccaattgaccaatcatgacttttttgtcagcaagaaagcttttttctttgacctttctccttggggagacgagccggcaacggatgatccgacacaagaagaaggactggacttgcagatactgaaaacttttctgcaagaagcctataagcaaaataaaggagagaaattctgctatatcggaggtttcccgagctggatttataaatatacgcagcatgctggaggaaagcatgaagatgtagctaccgagtgggaattttcccgtattatcagtgcttataatgcctttaaggatgccgatgccatcggactgggagcattggctaactcctccttctggcaacattttcctcttcaggaaaagtatccccaaaagtgggtgacacatcaggaactgatggacagaggctatctgaaccgtgacggaacaatcaactttcagggacggaactttatcctcttctatgtaggcgattatgattcctcctcctggattgctcagactacccctttcctgtgggacgaacctagccggggagaagtgcctttgatgtggtctgtcagtcctgtacttgcagaacgcgttccgatggtgatgcataattatcgggtgacggctactccgaatgattattttgccgctgctgacaatggtgccggatatttaatgccgggtatgttgcaagagcctcgctcggtgtccggattgaaaagcggattgagtgcatgggcaaagcattgcagcaaatattatcagaagtggggattgaccattacaggatttgtgattgacggcgaagcccccggactggattcagacggattggactgttacgcatcgttcagtccgaatggaatagttccgcagaagatgcctttgacattgctgcacaatgatatgccggtgatccgggcagattatgatattgtagatcatgattaccgcagggcaacggatgtgattgtggaaagagtggagaaacgtccggttcctttccattggttcagagccatattgaagtcaccttcctggtataaagggatttgtgatgagttgaaacagcggcatacgaatattgaattgctggatgcaccgacattttttgaactctatcgtatctatctgaagcagcatccggatgctgctgccggaaagataacgatgaactaacctgattaatgaacagacatattcatatagaatgatgatgaacagattgaatatgaaaagaacagtcggctcctgtttgatggcgatggcgtttttttcgtgtacccatacggatcagacgcccacgaaagactttgtcgattatgtaaatccatatatcggcaatatcagccatctgctggtgcctacttacccaaccgtacatctgccgaactcgatgctcagggtctatccggaaaggggagactatacatcggacagggtaaacggccttccggtcgtggtgaccagtcatagaggcagctcggcttttaacctgagtccggtgcagggagaggtatcccgaccgattgtatcttactcctatgatttggagaatattaccccctatagttattccgtatacctggatgaggctgatatacaggttgagtatgccccttcacatcaggctggtatttatcatatcagttttgggacggaaggtgataatgctctggtggtgaatacgaagaacggaaagctggtcgctgaagaaaaaggagtcagtggctatcaggttattgacaacactcctaccaaaatctatctgtatctcgaaaccagtcaactacctttacgcaaaggggtactggcagatggaaaagttgatatggaaagtaaggaaggcagtgccatcgctttgtattatggaagcgagaagaacctgaatctacgttacggaatttcctttatcagtgccgagcaggcaaagaagaatctgcaacgtgacatcaccacctatgatgtaaaggcggtggcggatgccggacgcaggatatggaacaagacattgggcaagattgtgatagaaggcggttcggaagacgaaaaagaaatcttctacacttccctttatcgtacctacgaacgcatgatcaatctttcggaggacgggaaatattacagtgctttcgatggcaagattcatgaagatggcggagtacctttttatacagatgactggatatgggatacttaccgggctacacatccgttgcgtatcttgatagaaccgcagaaggaactcgatatgattcgttcatatatacggatggcagaacagtcggacagaagatggatgcctaccttccccgaggtgaccggagacagtcaccggatgaatggcaatcatgcagtggcagttatctgggatgcttattgcaaaggattgaaagactttgatctggaggctgcttatgaagcctgcaaaggagcgattacagaaaaaacgttgttgccctggctgagatgtccgttgacggagctcgataagttctatcaggaaaaaggatttttccctgcactgaaccctggcgaagaagaaacttgcaaggctgttcattcgttcgagagacgacaagcggttgcggttatgttgggtaactgttacgataattggtgtctggcacagatagccagaacattaaacaagaccgatgactataagaagtttatgaggatgtcttatacgtaccggaatgtttataatgcggaaacgggtttctttcatcccaagaacaaggacggaaagtttatcgaaccgtttgactatcgatattcgggaggacagggggcacgtggctattatggtgaaaacaacggttggatctatcgttgggatgtgcagcacaatccggcggatttgattgccttgatgggtggacaggcttcatttatcgagagattgaatcagacattcaatgaaccgttggggcggagcaagtttgatttctatcatcagttgccggaccataccggtaatgtcggccagttctctatggcaaatgaaccttgtctgcatattccttatttgtataactatgccggtcagccgtggatgacacaaaaaaggattcgcgttttgctgaaccagtggttccgtaatgacttgatgggcgttcccggtgatgaagacggagggggaatgactgcatttgtggtattctccatgatgggcttttatccggtaactcccggttctccaacttataatatcggcagtccggtattccaatccgcaaagatggaggtaggtgacggacattattttgagatcatagcggagaattatgcgccggaccataagtacatccagtcggctaccttgaatggaacgccgtggaataagccgtggttcagccatgcggatattcaaaacggcggacgtctggttttgcagatgggagataagcccaataagaagtgggggatagcttcggatgccgtgccgccctcttcagagagtttgccggaataaagtcagaataataatattaaaatctaaaatataacacaatgaaaaagatgattgtactcaccagtctatggtcgtttttatttatcttttccttttcaatgttcggttgcagcgaggatgacgatgaatttggaacaacggccgaaagaggaaatgaagtccgtactccccgtgtggaggagatcaatggaaaagcagtggtcacctggattgatccttatattacggatatcaaggaggtgcaggtaaaggatttgcagactaatgagcaacagacggttgccaaaggagtgcagagcgcggaatttgcgattacggacaatagcctgttgtcttaccgatatgaaatgaaagttgtcagaacgaccggagaggtgtctgccggagtgactgcccgtctggtgaagaactgggcgcaaaagctgcatcctttgatggattatcatagtgatgcgactcctcaaagtggtatgttctttaagaatcagccggtggcgaaagtgaatgtattcgatattcgtgatgacgaaaatatatcgaagctgaccactgctgtcatgcagggagtgattaaccaggaacaggcactgacttatctgatctggttacagcaggatttgacgcagctggatgatgccgaagtgcagtatgaaatgcagcctttggcgaatacttcccgcaacagaggctttgcggcattatataatatgtataaagaccgcttcaactgcctggtagtctgggatgagaatcagccttggtcatggagtatggcacagatgatttcgtcacaggagaaaggcattccggttacggaatccatgagaaagtttatagaggacgagctgggaataggaaatctggaagttagggatatacgtaaccaatggtcgtcaaaggcagaagcttatggctgggcgatagcgcactatgctgacaaatgccatccgaagctaaccttctccggtggattgcggagtgattataaagataatccgtggagaatgtacgattacgtagctgcttctaaaggctttgtcttctggttggacgactctaatggagatgacaaacagatcatggataatatctttaatagtggatcttatccggtgggttcttcggtatttggttatggaatgaatgccaatggcgacgaactgaacaagattaccaacatccataatgcaggatttgtagtgagtgactattatgcgaatggcagttattggtgcagtttcccgagcaaagccttccagcagcgtaaagggatagccggagaagtgaagccgggtaagatatatgtcgctatcagtctgagtgacggagacaatattcagtttgatgcaaattctctttatcagatattcaaggaaggaaagcgcagaggcgaagttcccgtaggagtgactttggcggcaggcttacaggaattgaatccgaagctacttgaattttactataagaatatgactccgaacgatgaattgacggcagggccttccggtttccagtttatctatggtgattattatgcgcagagcggtaaatatgcggaatggctggaaatgaacaagaagtggttatccactgccggtttccacacggcgcatctctggaatacagacgagcagatgtatttcgaacaatacatgaagagcaaggctgtcgatgcgattatggacggatctaaccggacacataccacaggctcatcttacaaattggtagatggcgtggtgcgtattgatcaggggactatgtgccgcaataatggagacgtataccgtgatctgatgtctgtatctcccagcccgcggcgtcctttattccggcatgtctatctgttgaccaactattacggatttgaaggaaataaagtggtagtgtacgagagactgatcaaggaactcgaacgggttgaacaggattgtccggatacgtatgaatttatgctcccgatggatttggccgcttctatcaggaagtacatagaagaaggcggtgtttattaaaggaattataaacgaatctaaaacaaatgagatatgaaaaatagatatagtatccggttactggttatagtctttctttcggctttcgctatgggtatctgctactcatgttcggatgatgacggagaaggagtgaaggtatatgagtatcgtgaacagataggcaagaagataaaagtgttgaccgacctgcaggctgaatcccagttcgggcttcgggaaggaatgtatcctgaaacaagccgggcgattctggaagatgcgatagccaagctgaaagatttccttcagacgataaaagaagcgggagtggcggaagctcggattcccgaagagacagccagactgctgaaagaatcggacgaaaagatagccgagtttaaggcgactgtccggacggaagacttactggttccggcagagctggaagtaagcggaaagaatggcggatatattgactttggcgctcatccggagtattccacattcggtgaagttggcaagcaggcatttactgttgagttttgggtaaagctgaaggatgtagaaggcttcttctatctgatctctacctttacggatgatgatacgaacaatcacgaacgcaaaggctggtgcgtgaatagctacaactatggtggcaacaacatgcgtatgacatacggaatgggctttaatgacctgatggaacctgccttcggatttgccaccgttaatgagtgggtacacttggctgtggtgacggatgaaaccggagtagacggcgagatgaatggaggcagacctgtcatgaccaaaatgtatatgaacggtgaactgaaactttcgaccacctctcatcaggatgcttccaaaccgtatgcttctaacgacagcaatgtcccgatggtggcatttggcggcatgagtgctacaggcaaccgtatcggtgataaaggtgctaacggaagtatgaaacatctgcatatctggcgtaccgccaagactcaggatgaaatccgccggttgatggagcatccggagaatgtgacgggcgaagaggacgatttggtttgcggatggactttcgcgaagatggcgcttgacgaccaggaaattaaagacttgaccggaaagtatacggcaaagctggtcggagactataggtggattgaattagaatgatacgaaacagaaaatacaggatagatatgaaaaataactatttatataattgggtagtgatagtgtttatgatgcttcagatgctggcatttacttcttgttctgatgatgatgacaatagcggctggccgacggaaacggacaagaccgaaatcttcatagagcgcttcagtatattggtgactaacctgactgcgctgcgggatggagctacatatggcgaactgaaagataactatccggtatccagtaaagccatgctggatgatgaaattgtttatctggaggaaacgatcgctaaactgaaagaaggaaacaaaaagttggctgacagtgaagccgaccgcattatccgtgaagctaaccagatagagaagaacttcagagcgaccagacgtaccgaagactttttaccggttgccgctgaactgttggtcaacggaaagaatggcggatacattgattttggtgttcatccggagtattcagcttttggcgagcaggggcaacaagcattcacagtcgagttctgggtgaagctgacagatgtggacgaatatctcaatagctttgtattcttgctttccaccttcacggatgatgatacgaaagatcacgagcgtaaaggatgggcggtaaacagtcacttcggcagattacgtatgacgtatggtataggctatagtgacttgtttgaaccgggcttctcattcagcacactaaatcagtgggttcatgtggcagttgtcactaacgagaacggagtggacggagaagtcagagacggaattccggtgatgaccaagatttacgtcaacggtcagttgatgttgtcggaaagaggccgggatgaccgtttgccatatactccgaatgataaggaagtggctatggttgcctttaccgggcttagcgcaactgccaaccgtatcggagaaaagagcaccaatggatgtatgcgtcatctgcatatctggaaatcggcgaagacacaggccgaaatacaacatctgatggatactccggaatccgtgacaggaagcgaatcggatctggtatgcggatggacattgaataagactgtttcggataacaataacatcaaagatctgacgggcaaattctcagctaggctgatcggagattttcaatgggtagagaatagataattgttttacgaaccgggtagttcccaaggccgtcggatagctggctttgggactactttcttaaacaaacgaacatgaggaaagaacttgtttttgttttattggcattatttctgtgtgccggctgtaacggtaacaaaaagaaaatgaacggtgaacacgatttggatgcggcaaacattacgttggatgaccatacgattagtttttattataattggtatggaaatccgtcagtggatggagaaatgaagcactggatgcacccgatagcccctgctccgggacattcgggagatgtcggtgccatatccggacttaatgatgacatcgcctgtaatttttatccggaactcggaacgtacagcagcaatgatcctgaaatcatccggaaacatatccggatgcatataaaagcgaatgtcggcgtactgtctgtcacttggtggggagaaagcgattatggcaaccaaagtgtgtctctcctgctggatgaggctgcaaaagtaggggcaaaggtgtgctttcatatagagccttttaatggacgcagcccgcaaacggtaagggagaatattcaatatatagtggatacttatggtgatcacccggctttttaccgtacgcacggcaaacctcttttctttatctatgattcttatctgatcaaacctgccgagtgggcgaagttgtttgctgccgggggagagataagtgtgcgtaataccaagtatgatggtctttttataggtctgacattgaaggaaagcgagttgcccgacattgagacagcgtgcatggatggcttttacacttactttgccgcaacaggtttcacaaatgcttctactccggccaactggaaatccatgcagcaatgggcaaaggcacataataaattgtttattccgagtgtcggtccgggatatattgatacccggattcgtccttggaacggaagtaccacccgcgaccgtgagaatggaaaatattacgacgatatgtataaagctgccatagaaagcggtgcttcttatatttcgattacgtctttcaatgaatggcatgaaggaactcagatagagccggctgtctcaaagaagtgcgatgcttttgaatatttggattataaaccattggctgatgattactatttgataagaaccgcctattgggtagatgaatttcggaaagcaagatctgcttcggaagatgttcaataatatgctatatcttgccggttttgcccatttgtaattaaaatgttctatatttgtgatacataactcaaatatagaacattatgggtgaactttatggcacatgtgcattgcttgctgcagtattgttttttgttctgctgcaaaagtttgaaagccggttcggcaaggtagacaaagagcttggcgagataaagaaacgaatggacgacctgctcaaagctcaggagaaaatggcctccggccctgtaagggccaaagaggatgtaccggcagagactgtggaaaatacggatatactgccttatgtaacagaagaattgcccgattcgacagtgacagccttgaaggaagaaaaagctgtcgaagaaaaaactgttgaaggcatacagcccattatggcggaaactacgccgcagaaattaaacgcttcccttgaaaaagaatctgctgaggctactttgcaggaaacttctccggaagctcctttcgaaataccgtctgcttccaaacggaagcaggttaactatgaaaagtttatcggtgaaaaccttttcggtaagattggtattcttgtattcgtcatcggagtcggcttctttgtaaaatatgccattgataaagactggattaacgaaacattgcgtaccgtacttggtttcctgaccggctctgcattgctggtagttgccgaacgcctgcaaaagaagtaccgcacattcagctccttgcttgcgggtggcgcctttgccgttttctatctcacggtcgccattgcctttcatttttatcaccttttccctcagacggtcgcctttattattctgatagctataacgttgttcatgtctatcctgtccgttctgtatgacaggcgcgaactggctatcatctcacttgtcgggggatttctggcacctttccttgttagcaccgggaatggtaactacctggtactgttcacttatatgagtatcttgaatcttggaatgttcggactgtccatctataagaaatggggagaacttccggtgatcgcatttatttttacttatgtggtaatgggaatcttcctgctgacaggctttactaccggatcgacacacatttccgtccatctcttcatctttgcgacgctgttttatttcatcttcctcttgccgatattatcgatactccggatagaagctatgaaaaagaacaggggattgctgctggtcatcataaccaacaacttcatttatctgttattaggaatcctgttcctgcgtaatatgggactgccgtttaaatcggaaggattactgagtttattgatctctgtcatcaatttagttttagtcatctggttgcggatgagcaagaaagactataagttcctcatttatgcgatgttgggactggtactgacatttgtctccatcactatacctattcagttggatggaaattatatcacgctgttttgggcagcggaaatggtgttgctgttatggctttacgtaaaatcgaagattggagtatacgaacgtgcaacactggtgttgatgggactgacacttatttcatatctgatggacatatataatgtactgatgacctcttcctcctccgaaaccattttcctgaacagttcttttgctacttccctgtttgtcggtctggccacgggagcattcgctttactgatggggcattaccgttctctctttaccgaagcccgctatctgagatacactccctggaattcgattatgcttcttgctgctgccgttatcctctattatacatttatggcagagtttgccttgcacttggcaggagctacaagaagcggaatgatgttggcgtttacttccgctgccatctttatcctcagctatgctttcaaaaagcgcttcccgatagaacaatatataatcccttatctggcagctatgggaatgaacgtgctgatatatgcgattaatatatggggagaccagtgggtatacacgagcttgactcctgctttgctccgatggcttgcggcagcgtttgttatagctaacctctactacgttgcccgtcaatactatacattaataggattgaaaactcctttcaccgtttatctgaatgtcctggcgctcttcctttggctgacgatggcacgttctttcctcctgcaagcaggagtagaagatttcgatgcaggcttctccgtttcactgagtatcgcaggatttattcaaatggcactgggtatgcgtctgcatcagaaagtactgcgaatcatcagtctttcaacttttggcatcgtcctgttgaagctgattctgaaagacttatgggcaatgccaacaatcggtaagatcattgtatttatcattttaggattaatcctgctgattctctcattcctttatcagaaactgaaagacgtactctttaaaaatgatgaagatgaaactgattgagcagactatataataaagtaaaggctgcctgttcgaaagtggacggcagcctttactttattatattcgtctttattatctttattcctgtgaagccgcgaagcgtttcacctgctcttcaatcagttctttgtcatcgaaatagttgatcttcatagccttcttcacatccgccaatgtttcggcagcggcagctctggctacttcgcatcctttttgtagcatctcgtaaacggcaggaatatccttgctgaactctttacgacgattgcggatcggttccagtgtttcctgcatgatagcgttcaggaagcgttttaccttcacatcacccagtccaccgcgttgataatgcgctttcagttcatccagattcggataatccggcagatagcgttcgaagtgttccggacggcagaaagcatccaggtatgtaaatacggtattaccttcaatcttgcccggatcctgtacgcggaggtgtcccggatcggtatacatactcatgattttcttctgaatttcttccggttcttccgacaggtagatacagttgccgagtgatttactcatcttggctttgccgtccgttcccggcagacgcaggcaggcagcgttgtccggcaacaggatttccggttctaccagcgtttcgccatagatatagttgaaacggcggacgatttcacgagcctgttcgagcatcggttcctggtcttcaccgacggggacggtggttgcccggaaggcagtaatgtccgcagcctgactgataggataagtgaagaatcctacagggatgcttgcctcaaagttacgcatctgtatttctgatttcacagtcggattacgttgtaagcgggatacgcttacgaggtccatatagtagaaactgagttcgcaaagttccggaatctgtgactggatgaagatggtagccttggacgggtctattccacacgccagatagtcaagagcaacctcaattacattttgacgtaccttctccggattatctatattgtccgtcaacgcttgtgaatcggcaataaagataaacatcttactataatcacctgcatcctgcaggtcaactctgcgcttcaatgaacctacatagtgtccgatatgaagtctcccggtagggcggtcaccggtgagtatgattttttcttttcccattgttgttaccttattataatagatttagcgacaaagataaggataaaaaatgaaagatgcgtcaaaatggagctacttcgttactaatgcttactattgctggcttttggtatcagatggcagggggacggtgcctgttttcacagtaacaaagcaaataaaagagaatattcttcttcaaattctttgtagttttagaaatatgtcgttactttgcacaaattttgaaatcgacaatgaatcaacaagaaataagaagtaagtattatctacattcggatgttttccacccggaatcaacaaccttcttcttttttctccaaaaacgatattttagttctttggtaatgcgttaatccttttacgagggtaacgcattttttttattggcaaaacttagaaataacaacttactataacaacaaaagaaatggaaaaggaaatcaagaaagttctcgttttgggttctggagcactcaaaatcggacaagccggagaatttgactactcaggctcacaagcactgaaagctttgaaagaagaaggtatcagctcagtattggtaaacccgaacatcgcaaccattcagacttctgaaggaattgccgataaagtgtatttccttcccgtaactacttatttcgtagaagagattatcaagaaagaacgtcccgacggcatcctgctggcatttggcggacagactgcattgaactgcggcgccgaactgtacacgcaaggtactcttgataaatatggagtgaaagtactcggtacatcggtagaagctatcatgtacacggaagaccgtgacctgttcgtgaagaaactggatgaaatcaatatgaagactccggtaagtcaggcggtagaaagcatggaagatgccatcgctgctgcccgcaagatcggttatccggtgatggtacgttcggcttacgcgttgggaggtctgggtagcggtatctgcgctaacgaagaagaattcctgaaactggccgaaagctctttcgccttctccaagcagattctggtagaagaatctctgaaaggctggaaagaaatcgagttcgaagtgatccgcgacgcgaacgaccactgcttcactgtagccagcatggaaaacttcgacccgctgggtattcacaccggtgaatctatcgtagtagctccgacttgctcattggacgacaaagaactgaaactgctgcaggaactgtctacaaaatgtatccgtcacctcggcatcgtaggtgaatgtaacatccagtatgcgttcaactcagatacggacgactaccgtgtgatcgaagtaaatgctcgtctgagccgttcttccgcgctggcatccaaggctaccggttatccgctggcattcgttgccgccaagatcgcattgggttactcactcgaccagatcggtgaaatgggcactccgaactctgcataccttgctccgcaactggactactatatctgtaaaatccctcgttgggacttgacgaaattcgccggtgtatcccgcgaaatcggttcaagcatgaagtcggtaggtgaaatcatgtctatcggccgctctttcgaagaaatcatccagaaaggtcttcgtatgatcggacaaggcatgcacggttttgtcggtaatgacgatgtacacttcgacgaccttgacaaagaactttcacgtccgacagacttgcgtatcttctctatcgcacaagctatggaagaaggatattccatcgaccgcatccacgaactgactaagatcgatccttggttcctcggcaagctgaagaacattgttgactacaaggcaaaactgtctacatataataaggtggaagatattccggctgacgtgatgcgcgaagctaaaattcttggtttctctgacttccagattgcccgcttcgtactgaacccgaccggcaacatggaaaaggaaaatctggcagtacgcgctcaccgtaaagccctgggcatccttccggcagtaaaacgtatcaatacggttgcttccgaacatccggaactgactaactacctgtatatgacttatgcagtagaaggttatgatgtaaactattataagaatgagaaatcagtagtcgtactgggttcgggtgcttaccgcatcggtagctcggttgaatttgactggtgttcggtgaacgctgttcagactgcccgcaaactgggttacaagtctatcatgatcaactacaaccccgaaacggtttctactgactacgatatgtgcgaccgtctgtacttcgacgaactctctttcgaacgtgtactcgacgtgatcgaccttgaacaaccgcgcggtgtgattgtatccgtaggcggacagattccgaacaacctggctatgaagttgtatcgccagtcagttcctgtactgggtacttctccggtttccatcgaccgtgccgaaaaccgtaacaagttctcggcaatgctcgaccagcttggcatcgaccagccggcttggatggaactgaccagccttgaagaagtgaagggatttgtagaaaaagtaggttatccggtattggttcgtccttcttacgtactttcgggtgcggctatgaacgtttgctacgatgacgaagagttggaaaacttcctgaagatggctgccgaagtatctaaagaatatccggtagttgtttctcagttcctcgaaaacacaaaggaaattgagttcgacgcggtagctcagaacggtgaagtcgttgaatacgctatttccgagcacgtagaatttgccggtgtacactctggtgacgctacactggtattcccggcacagaagatttactttgcaactgcccgccgcatcaagaagatcagccgtcagattgctaaagaactgaatatctccggtccgttcaacatccagttccttgcccgcaacaacgaggtgaaggtaattgaatgtaacctgcgtgcttcccgtagcttcccgttcgtatctaaggtgctgaaacgcaactttatcgaaacagctacccgcatcatgctggatgctccgtacagccagccggacaagactgcgttcgacatcgattggatcggtgtgaaagcttctcagttctctttctcccgtcttcacaaggctgaccctgttttgggcgtggatatgtcttctaccggtgaagtaggttgtatcggcgacgatttctctgaagcattgctgaacgcaatgatcgctacaggattcaagattccggaaaaggcggtgatgttctcttccggtgctatgaagtctaaagtagatttgctggatgcgagccgtatgttgtttgccaagggatatcagatttatgctactgccggaacggctgcattcctgaacgctcacggtgtagaaacgactccggtttactggccggatgaaaaaccgggtgctgaaaacaacgtgatgaagatgatcgctgaccataagttcgacttgatcgtcaacattccgaagaaccacagcaaacgtgagttgacgaatggttaccgtatccgtcgtggtgctatcgaccataacattccgttgatcaccaatgcccgtctggcaagtgctttcatcgaagcattctgtgaactgaaactgagtgatattcagattaagagctggcaggaatataaataaactgctttagctgtatatatattgaggagactctctctttggcataccaaagagggagtctcttcttttgtagatatgactcttctttttgtttgttgtctgcggtgtaatgagtcgtaagatagtgctaatgttctcttcagctccttatatacttgctttttcctataaggaaagtaggaatagagtgccgttctctttagctcttcacggccgtgaacaggtctgctcatggccgtgatcaactcttgtcacgaccgtgaacaatgcttgccacggccgtgaacaactaaagagatcggtgtcttaatggaacaataaaggcactataagagaaagataccggtagtatacggtatttgttgcgtaggatcaggactcggatgaagtaggcttgatggggagatagcagtaggtgagatgaacagtgagattgggagggaggtgacaataaaatgtatgaatgcggctattgtcaccgtattatcaccgcttattatcaccgatgatgtgtttataatcagttagttaacttcgaaaagtgataagtgacaataaaaaagcgttttattgtttagggaaggagcgtttgtgtagctttatggttatacaggtttgaattgattcataaccatacaggaaacgagctaaattaaaagtcggtagtatcttaaatctcctccttcgggaaggaggagtacccgcagggggaggtggtaggtgaatacgcaattctttcattcataacaaattaggcacaccttgttttacctaccaccccgccctttgggcacccctccttcccgaagggaggggaatccatgcggatagctagcttaaccccagcggatagctggttcgaaactgtgcataaatgaaatgaatgattgtgcttcttccagaagcggattacacagattgatacggtttttggtagattgtaccgctaaaaaaatgtgaaatctgtgtaatccgtatctgaatcttatggtttgcttacgcaataattgtatactttcagattctgtaccttactattaaagtttcctgctttctccaacgggaaaaccagtgtacgtacataattcattgaatcttttcccgcattaaagtaaagtttctgcgtattcatttcatcgaccactttaccgttgactctcagcgttgtactgcaattgtctccttctatctgaatcgttgctttttctcccggattcactttgtaggggaaggtattcagatagccgtcgcgtgcaaatcccatcatcccccgaatagggtctgacagatagaatacggcgttaggcgaacggaacaattcggttccttcactttcttttgctccggtaatgtcgaaactgacagtgtaattatagccaatttccggataatcggaagtgctgccgggagcgactgtggaacgttcgtataccaattccggctttttgccgattcttgccagttggttgactccgggcgcttcgctgaggagggcacgtttttcattgaatgtttcataaggaatgcctgtttgagcgcctgtccacatctttacagagagtgtttgcaggggcgagaatatacggtgatggatgtctttcaccgagataccgttgccgacatggtcgttccagatggcaaacataccgccaagaatggaaggatgtttttcgtcgaatacagctttgccgatatgggcgggtgtccactccttatataagtatggttcgttgaggtaatcataatagtagccggctttcggaacgatatataccagtccgtccggaatactgatcagttgatatccgtctttgatcatggttgccggatcggcgtatccgttgtaccaagcattcatgacgacattttctgatttgacgggcgtatcgcctttggcatggctgagcgcgccccatacaactgcttgcttgccgaaaccttccacaaaacggatgtaatggtcggtgaaagcacggaatttttctaccacgtctttcttcgcgttcgagtattcgtctgtaccgatatgtacacgcttgcctacgaataccggattgtcgccctccagatattctttgaacagagcatctacgaattcgtaagtttccggcttgaataagtcgaggtgatccatgccgtactccttgcttccgatttccggtttgtaatgggtgagagccagtgagtgggcgggaacgtcaatttccggaatgatttccacgaagttggataccgcctgtttctggaagtcgataaattctttcttggagtacgagccgtcacgggctgtcaatcccggataagtctctgattccagccggaaggcagcgtaagtcttgtcccagttgtgttcgaagtattgcttgaatccattatcgttcagatggacttgcagggtgttcattttgtagtaagccatgattttcaccaagtcctgcagataagccatcggaatgaacttacggccacagtctatcatgaaaccgcgaagcggataatcgggataatcacgaatcgttccttgcgggagtgagcgttcctgattttgttccgccagttgcaggagtgtgcgtgtgctccagtaaagaccggtcggggtgggagcggagatggctacacggtcggttatcttgatggcgtaaccttcctcaccgagcttcttgtctgccgacaaggataggacgaaatcgccgggcgtggctttgccttgtgctacgcttaatgtctgcccgaacatctgttgataatcgtcggcaaacatccgggctattctcagtaattcgggattttgggaagtgcagacgattcgggcgtcttttcccggggtgaagttaccgtcttttcccgtccattgtttgagttcggggacaacaaacggtttcgggttgacagcggcacgggttaagctacccgtcagacaaaagatgaccaataaggccagaactttcaaagatacaaacttgtttctcataagggggatttttgtgtttttgttaattaataaatgattatagttaattattggctgaaagtaggcataatttggatatctgtcaacaagtgaagctatttattttttatttttgtgtttttcaaaatgattaaacccgattcagaatgttagtacttctatcttgtgccaagacgatgagtgcggtgtcgaaggtgaaagtccctttgactacgatcccccgttttcagaaggaagcggcggaaatagcgttgcagatgtcccagttttctgtagacgaattagaacgtctgctgcgtgtaaacgcaaagattgctgtggagaattataaacgttatcaggcttttcatgcggaaaccactccggaattgcctgctttgctggcgtataccggcattgtattcaaacggctgaatccgaaggacttctctgcagaagatttcgggtatgcgcaggaacatttgcggctgacttctttctgttacggtctgttgcgtcctttggacgtgattcgtgcttatcggctggagggggatgtcgtattgccggaattggggaatcagactttgttttcttattggcggtcgcgtctgacggatacgttcatagaggacatccgatcggcaggaggaatcttgtgtaatcttgccagtgacgagatgaaaagcctgtttgactggaagcgggtggagagcgaagtccgtgtggtcactcccgaatttcatgtctggaagaatggaaagctggctacgatagtggtgtataccaagatgtcccgtggcgagatgacacgtttcatattgaaaaataagatcggaaatccggaggaactgaaaggattctcgtgggaagggttcgagtttgacgaatcgctttcggatgaaaggaaattggtatttattaatgggatgggagaataaggaatatgacagaagtagagaagatgcgtagcagccagttggctgatatgtccgcgccggagttgcaggtgcgttttgagcatgccaagaagttgctggcgatcatgcgcgggttgagcacgtacgatgacgggtacagagaattgttggaagaactggtgccgggtattcctgaaacttcggtgatctgtcctcctttccattgcgatcacggagacgggataaagttgggcgaacacgtgtttgtcaatgccaactgtacttttctggacggagggtatatcacaatcggtgcccatacgctagtcggtccttgcgtacagatttatacaccgcatcatccgatgaattatctggagcgtcgcggttcgaaagagtatgcttatccggttacgatcggcgaggattgctggattggcggcggtgctgtcatttgtcccggtgtgacgattggcaaccgttgtgtgataggagcgggaagcgtcgtgacgaaagatattcctgacgacagtgttgcagtcgggaatccggcgcgccttatccgtaagcaggcttgaccgggaatcttatttcccggatttgagtgttcccacattgttggctttatcttgttctgtttagtggacaggcttggagaagggaaagttgcatgaaaaaaacttttttcattatttgctgataatcagttggtttttatttttgataaaaagtttcttgaaaaataatatgcaaaatgtttggaggtttcaaaaaaagccgtacctttgcatcgcttttgaaacggaagtgtacgggcgcttagctcagctggttcagagcatctggtttacacccagagggtcgggggttcgaatccctcagcgcccacaaagaataccgaaacacttccgtcaacaaaagggcgcttagctcagctggttcagagcatctggtttacacccagagggtcgggggttcgaatccctcagcgcccacgaaatagaagtcttacgaagaaattcgtgagactttttttatttcttaccgcttttatacaaactttctttatccttttgccttataactcaggaaaaagagttaattttgcagtctgataattatctaagaaaacgtatggaacttgatgtattaacggccatatctccgattgatggtcgatatagaggcaaaactaaagctttggcagcttatttctctgaatttgcactgattaaataccgtgtacaggtagaggtggaatactttatcaccttgtgcgaacttcctttgccgcagttgaaaggaatcgatagcagcgtgtttgaaactttacggaatatctaccgtaacttctcggaagcagatgcgcaacgcattaaagatatcgaaagtgtaaccaaccatgatgtaaaagccgtagaatatttcctgaaagaagaattcgataagctgggtggaatggatgactataaagaattcattcacttcggattgacttctcaagacattaataatacgtctgtgcctctttctatcaaggaagctttggataaagtctattatccgctgatcgaagaactgattgcacaactgaaaacgtatgcaacagaatgggctgaaatcccgatgcttgccaaaactcatgggcaaccggcttctccgactcgtttgggtaaggaagtgatggtattcgtttaccgcctggaacgtcagctggccatgctgaaagcatgtccgatcactgcaaaattcggtggcgctaccggaaattacaatgctcatcatgtagcatatcctcaatatgactggaaacaattcggtaatcggtttgttgcagagaaactgggactggagcgcgaagaatataccactcagatttcgaactacgataacttgtctgctgtctttgacgcgatgaaacgtatcaacaccataatggtggatatgaaccgtgacttctggcagtatatttctatggaatacttcaagcagaagatcaaagccggtgaggtaggatcaagcgcgatgccgcataaagtgaatccgatcgactttgaaaatgcggaaggtaatttgggtatcgcaacttctattctggaacacctggctgtgaaactgcctgtttcccgtttgcagcgtgacctgacagactctacggtgctccgtaatgtaggcgtgcctttcggtcatatcgtgattgctattcagagttcactgaaaggacttcgcaaactgttgctgaacgaaccggctatttaccgtgatttggacaactgctggagcgtagtggctgaggcaatccagacgattttacgccgcgaggcttacccgcgtccgtatgaagcattgaaagctttgacccggaccaaccaggctattacagaaagttctattaaagagtttatcgaaggcttgaacgtaagcgaagatattaaaaaagagttaagagcaattactccgcatacatatacgggactttaattgtttacttatacaataaacgtgtttttttaataggccgtgaggccaaagtctaattttattcgaataaaaaaatgagcacagaaaacgaagaatggcgcgaaaattcttacaatgaggagaatacaggtgccggccgtgatggtaacaagtcttacaacagagaaggtggagaacgtccgtatcgtccttcttacaaccgtgaaggtggggatcgtccgtatcgcccgcgatttaatccgaatagtgaaggtggagagcgcccacagcgttcttatggtgaacgttcttatgatcgcccccaacgtccttcttacaatcgtgaaggtggagaccgtccgtatcgtcctcgcttcaatagcaacaatgaaggaggcgaacgtccgcaacgtccttacaaccgcgaaggtggtgaacaacgttcttatgatcgtcctcaacgcccttcttacaaccgtgaaggtggagaccgtccgtatcgtccgagatttaatccgaacggcgaaggtggcgatcgtccgcagcgtccttacaatcgtgaaggtggcgagcaacgctcttatggcgaccgtccgtaccgtccccgttttaacagtggcgaaggtggcgaccgtcctcagcgtccttataaccgcgaaggtggtgatcgtccatatcgtccccgcttcaacagtggtgaaggtggtggctaccgtaataacaacggtggtggctatcgtccgagatttaacaatgaccgttcgcagggtggctatcgtccgcgtccgcgtaccagtgattacgatccgaatgctaagtatagcatcaagaagcagattgagtacaaggaacagtttgttgatccgaacgaaccgattcgtctgaataagttcttggctaatgccggtgtttgctcacgtcgcgaagctgatgagtttatcacagcaggtgtggtttctgtaaacggtgaagtagtaactgaattgggtacaaagatcaaacgctcggatgtggtgaagttccacgatgaaccggtaagcatcgaacgtaaggtatacgtactgttgaataagccgaaagatacggttactacatcggatgatccgcaggaacgccgcacggtaatggatctggtaaaaggcgcttgcaacgaacgcatttatccggtagggcgtcttgaccgcaacacgactggtgtacttctgttgacaaatgacggtgacctggcttccaagctgacacacccgaaattcttgaaaaagaaaatatatcatgttcatctggacaagaacctgacaaaagcagatatggatcagattgcagccggcgtacagttggaagacggtgaaatccatgcagatgctatcagctacacagatgatttcaagaaagaccaggtaggtatcgagattcactccggcaagaaccgtatcgttcgccgtattttcgaatcactgggatataaagtagtaaaactcgaccgtgtattctttgccggactgaccaaaaaaggtctgcgccgcggagactggcgttacctgtcggaagcagaagtaaactacctccgcatggggtcgtttgagtaatatataatattgtattaaaaaagttttatggaaaagattggtagaacaaaaattgttgatctgttgaagcgcgaagatattggcgctatggtcaatgtgaaaggatgggttcgcacccgcagaggtagcaaacaagttaactttatcgcactgaatgacggttctacaataaataatgtgcagatcgtagtagatctggctaatttcgatgaagagatgctgaaactgattactaccggggcttgtattagcgtgaacggagtaatggtggaatctgtgggttccggtcagaaggtggaagtgcaggctaaagaaatcgaagtgctgggtacttgcgacaatacatatccattgcagaaaaaaggtcactccatggaattcttgcgcgagatcgctcacttgcgtccgcgtaccaatacctttggtgcagtgttccgcattcgtcacaacatggcgattgctattcacaagtttttccatgaaaagggatttttctatttccatacaccgattattacaggttccgactgtgaaggtgccggacagatgtttcaggtaactaccatgaatctgtatgacttgaagaaagacgaaagaggttctatctcttatgatgacgacttcttcggcaagcaggcaagtttgacagtatccggtcagttggaaggtgaattggctgccactgctttgggcgctatctacacattcggtcctactttccgtgccgaaaactccaatactccccgccatttggcagagttctggatgattgagccggaagttgcgttcaacgacattgccgataatatggacctggcagaagagtttatcaaatattgtgtgaaatgggcgttggataactgtgcggatgatgtgaagttcctgaacgatatgttcgataagggcttgattgaacgtctgcaaggtgtattgaaggatgatttcgttcgtttgccttatacggatggtatcaagattctggaagatgccgttgcgaaaggtcacaagttcgaattccctgtttactggggggtagacttggcttccgagcacgaacgttatctggtggaagaacacttcaaacgtccggtgattctgactgattatccgaaggaaatcaaagccttctatatgaagcagaacgaggatgggaagacagtacgtgcaatggacgttcttttcccgaagatcggtgagatcattggtggttctgaacgtgaagcggattataacaagttgatgactcgtattgaagaaatgcatatcccgatgaaggatatgtggtggtatctggatacccgtaagttcggtacttgtcctcactccggtttcggactcggttttgaacgtctgttgctgtttgtaacaggtatgtcaaatatccgtgacgtgataccgttcccgcgtacaccgagaaatgctgatttctaatatttcggtatatttatgtaaaactcgcataatcttttgattgtgcgagtttttttatgcatttgattgttactttctcaaaataaatctttatatttggacatgcgcattcaagagtgttaactaaaatcatattgtcatgaaaaaactctatttctttaccatgctttcaatcatgttgttagcggtaacaggtgcgacggcccaaaagaaaaccaaattcaaaccggccgatttgaaagggatctggcagttgtgccattatgtctcagaatctcccgatgttccgggatcgttgaaacccagtaatacatttaaggtattgagtgatgacggcagaatcgtgaattttaccattattcccggttctgatgcgattatcacaggatatggtacatataaacagttgaccgatgattcttataaggagagtatcgagaagaatatccaccttccgatgctcgataatcaggataatattctggagtttgaaataaaggataatgattatttgcatttgaaatacttcatcaagaatgatctgaacggaaacgaactgaatgcctggtattatgagacctggaaacgggtggagatgccggctaagtttccggaagatattgtgcgataaatgagattgcaatatagattctttgttgttttttgacctccccggtgtaaatccggaggaggcctttttattttctgttccttatttgtaaatatagtaagttccccttgtcatacaacccgataaatccaaaaaaaactggaaatagtttgccaattcaaagaaaagccgtacttttgcaagccgattattatcacaaaatgataagagattaattcatagcaagttagtcctcctttgtccggggaaggctgatatgtggtgaagaaaatttttagtagtaacatttaaaaaacaaaattagagtggatactttaagttacaagaccatttctgcaaacaaagcgaccgtaaccaaagaatgggttatcgttgacgctacagaccaaactttaggtcgtctgggagcaaaagttgcaaaattgctgagaggaaagtacaaaccaaactttactcctcacgtagactgcggtgataacgttattatcatcaatgcagacaaagtaaaactgactggtaacaaatggaatgacagagtatatttgtcatatacaggctaccctggtggtcagagagaaatgactcctgcccgtttgatcactaaaccgaacggtgaagagagattactgaaaaaagtagtgaaaggtatgcttcctaagaatatcctgggagctaaattgctgggtaacctgtatgtatacgctggtagcgaacacaaacatgaagctcagagcccgaaaatgattgatattaattcatataaataagatataatggaagtagtaaatgcattaggcagacgtaaacgtgcaattgcacgtgtattcgtaagcgaaggtacaggaaagattactattaacaagagagaccttgcagagtactttccatcaactatacttcagtatgttgtaaaacaaccattgaacaagctgggtgctgctgagaagtatgacatcaaagtaaacttgtgtggtggtggcttcactggccagtctcaggcattgcgtttggcaatcgctcgcgcattggttaagatgaacgctgaagataaggctgcacttcgtgctgaaggcttcatgactcgtgacccacgttctgtagagcgtaagaaaccgggacagccgaaagctcgtagaagattccagttcagcaagcgttaatgtgctgcctgaccgaggaatatgtttagtatctaaactactgggactctgctcatagactacccagcggttggtttagaaaaaacaaaaaagaaagtaaacgatttaaagaaaaaacaagatgtcaagaacaaattttgatactttattggaagccggttgccacttcggacaccttaagagaaagtggaaccctgcaatggctccttatattttcatggaacgcaatggtattcacatcattgacctccacaaaacagttgcaaaagtagacgaagctgctgaagctttgaaacagattgccaaatcaggcaagaaagttctttttgttgctactaaaaaacaagcaaagcaggttgtagctgagaaagctcagtctgttaatatgccttatgtaatcgagcgctggccgggtggtatgttgaccaacttcccgactatccgtaaggctgtgaagaagatggctactatcgataaattgactaacgatggtacatattctaacctttctaagagagaagttcttcagatctctcgtcaacgtgcaaaattggacaagactttgggttctatcgctgacttgactcgtctgccgtctgcattgttcgttatcgacgtaatgaaagaaaatatcgcagttcgtgaagctaaccgtctgggtatccctgtattcggtatcgttgatactaactctgatcctacaaacgttgacttcgtaattcctgctaacgatgacgctactaaatcagtagaagttatcctggatgcttgctgtgctgcaatgatcgaaggtttggaagaaagaaaagctgaaaagatcgatatggaagctgctggtgaagctcctgcaaacaaaggcaagaagaaatcagtaaaagcaagactcgacaagtctgatgaagaagctatcaatgcagcgaaagctgctgccttcatcaaggaagacgaagaggcttaaatatataaatgtgccaatttgctagcgtgcaggcgtgtggtagttacctcatcctgcattgtattggcagattggcacattttttgttttgaaaattattattcatttaaataaaggaaattattatggctgtaactatggctgatattaccaagctgcgcaaaatgaccggagctggtatgatggattgcaagaatgcattaacagaagctgaaggcgattacgacaaggcaatggaaattatccgtaagaaaggacaagctgttgctgctaagcgttcagaacgtgatgcttctgaaggttgcgttttggctaagactaccggtgactatgccgttgtcattgctctgaagtgtgaaactgactttgtggctcagaatgctgattttgtgaaactgactcaggatattcttgatcttgctgtggctaacaaatgcaagacattggacgaagtaaaagctttgccgatgggtaacggtactgtacaggatgcagtggttgaccgtagcggtatcacaggtgagaaaatggagcttgatggttacatgactgtagaaggaacaagcactgctgtttacaatcacatgaacagaaacggtctttgcaccattgttgcttttaacaagaacgttgacgaccagttggctaagcaagtagctatgcagattgctgccatgaatccgattgctattgatgaagatggcgtttctgaagaagtaaaggaaaaggaaattgctgttgctatcgagaaaacaaaagctgaacaggtacagaaagctgtagaagctgctttgaagaaagctaacatcaaccctgctcatgtagatagcgaagagcacatggaaagcaatatggctaagggctggattacagctgaagatatagctaaggcaaaggaaattattgctaccgtttctgctgaaaaggctgcacatctgccggaacaaatgattcagaacatcgctaagggtcgtctgggcaagttcttgaaagaagtttgtctgctgaatcaggaagatattatggacgctaagaagactgtaagagaagtattggcagctgctgatcctgaactgaaggttcttgactttaagcgcttcactctgaaagctgaataatttatctcaaaaagataatagagaagggcggaactttgatggtttccgccctttttcattatcctccgacccctttggtctttgtatatccttcttttatcagcaggtctatcactttctgcttgaaatctccctgtacgatgatttctccgtctttggccgaacctccgactccgcatttactttttagcatttttccgagttctttttggtcattctctgttccaacgaatccggtgatgagtgtaactactttgccgccacggttttttcggtcgagagaaacccgaaggttctgtttgctcttgtccagcgtcacttgttcctgatcgtcatccatgtcatagttgaaatcaggatttgtagagtagaccacgttcaatctatctttccaatcattatttttcatatacttcaacttttattgtgtcaaaagtaatattttgtggggaactttgcaatcttttgtttactttggcgtctaataataaaacgaaataagactaataaacagaaaatgatgaaacgatccatagcgtttgctctcatatgttcttttactatttctctttgggcacaaacatttaaaggcagagtagttgatcttgcaggaaatccgatcccctatgcggcactctatctgaaagaacttaaaacaggcttcaccaccgatgataacggctgttttcagacctcgctcccggcgggataatatacctgtgaggtttcttctttaggtttcgctggacaaacattctccttttccatatctgccggagatgtggaaaagaatattgtgctctccgaacaaatatatagtctgcgggaagtgaatgtggtgaaagatgcggaagatccggcctattccgtaatgcgtaaggcgattgcgaatgctccttattaccggacacaggtgaagggatttagggccggaacctatctgaaaggcacaggaaaaatgaagactattcccgcaattctaaagttgtcgaaggaagtcaggaaagagtcgaaagagtttctgggcaagttgtttgtgatggaggaacagagagtggtgacttttaaggcaccctctacttgggagaatcaggtaaaggcctattccaattcatttcccgaggagatggaggtcagaatcggtctgaccactattaacttttacgagcctactatcttcgataaagtatcaccgctaagtgccggagcattctcttattaccgttttaaactggaaggctgctatagtgaaggcaaccatctgatcaataaaataaaagtcctccccaagcaagacagtccgcgtctggtgtccggagatttgtatattgtggaagatctctggtgcgtctctgcggctgaattttctatccgtatgagtggcctgaaagctacggtcaaggcaacttgtaaagaagttcagccttctgttttcctggctacctccacaagtatgtcctgtgaaatcaaaatgatgggattttctgcagaggcttcctatttggcagcagtacattatacgaatgtggaaatagcagaccgtcagcaagtgatgaatggggcttctgatgcctcaccgaaacaaaacaggaagcagcagaagcttgtaaagcagatagaagaactgtcgacgaaggaggacttgactttgagtgaagcctataagctatctaagctgatggaaaagaacattgccgaatccgatactgcacgttctccgcataaatatgaacgtaaagtgagaaagagagaagtgaatataaagaccgattcgctggcggacaaaaaggattcgctttattgggcagctgtcagaagtgttcctttgcgtccggaagaaatacagagttatatccataaagaagagttatccctctccaaagactcccttcaggagaatgattcggctaaaacaacagttgggaaaaagatcattcaaacattcctgatgggtaaaacctatcgtacttcagacaagaaagcatggattggctggaaaggcttgccttcctatgtgcctgagtataattttgtagatggcttctggctgggagctaagtttgaaacagggttgaaattatcggaggcctctactttgcaattcactccttctgcttattataccactgcccgtaaagcggtagcaggacaaagtgaactctccttgagttatgctccgaggcgacggggatatctggaactgtccggcggagttcttcctgccgattataatggagaaagtggagaatcccgtctgataaataccgttgcctcttctttcttcgggcggaatgatgtgaaactctatgagaagcgtttcctgtctttccaaaataagatcgaactggcgaatagtttgttgctttctacctcgctttcctggcagcgacgacagatgctggagaatcatatacaccggagctggttcaagaaagaagcggagtcgaatattccggacagccgggcattctatccgatgccggaaaatgaattgttgaaagcttcctttgccttggaatatacaccggctcattattaccggatgtacagaggaaagaaagtatatgaagaatccaaatgccctacctttacattgcgttatgaccgtgctttcccgttgaaaggggctttgccttctccgtcctatcacttggcggagttttcggtcaggcagagcatagagttcggaatgtttaatacactggactgggctgttaatgccggaacattctggaataagagcggtatgcaattccccgattttaagcattttgcgaccacaggtttgccggtgacggaacgctcgtttgatacaggattctctttgctggataattatgcatactctaccaatacccgttgggtacaagctaatatttcctggtacacaccctgtctgttgctgaaatttcttccttttctgaaaaagaagaacctcgatgaagcgctgcatctccgtacacttgtggaatacgaccgccgtccctattcggaaatcggttactccatcggattcatgaaactggcacggttaggcgtcttccttggcttcgacagtttgaaataccgctcggcgggagtttccgtcagcattccgttgtcaacgtttgcgggagaatagcacctgtgtagaaatagtatgaatcattcttgcaattccgaaaaaaaacgtatttttgtcaatcttataacctgaataaataaaagaaatggccgagaaccaaaagatacagcagatagattgtacgaaagtgccggagcctactttgcgcagactgccttggtacttgtcgaatgtcaagttgctgaagcaaagaggcgaacgttttgtctcttctacgcagatatctaaggaaataaatattgacgcttcacagatagcaaaagacttgtcgtatgtgaatatctccgggcgtacacgtgtagggtacgaggtcgatgcgctcattgaggttttagagcacttcctggggtttacggagatacataaggcttttctttttggagtcggcagtctgggaggcgcacttttgcaggactccggtctgaagcatttcgggcttgagattgtggctgcttttgatgtagacccgactttggtcggcactaacctcaacgggattcctatctaccattcggacgactttctgaagaagatggaagaatatgacgtgcagattggcgtgctgaccgttcctatcgagattgcccagtgcatcacagatatgatggtggacgggggaatcaaggcagtctggaactttaccccgttccgtatccgtgtacctgaggacatcgtggtacagaatacatccctttacgctcatctggcggtgatgttcaaccgccttaattttaatgaaatcaaataatgaagattattgccgtaggaatgaactatgccctgcacaatcaggagctgggacatacatccgtaaataaagaaccggttattttcatgaagcccgattcggctattctgaaagatggcaaaccgttctttatccccgatttttcgaatgaagtacattatgagacggagcttgtagtacgcatcaaccgtttgggaaagaatatttctccccgttttgccagtcgttattatgatgcattgacggtaggcattgactttaccgcccgtgacctgcaacggaaattccgcgaagcgggcaatccgtgggaactttgcaaaggtttcgactcttctgccgctatcggcacctttgttccggtagaccgctacaaagatatccagtctctgaatttcaatctgatgattgacggcaaggaagtgcagcgcggctgtacagccgatatgcttttcaaagttgatgacatcattgcctacgtcagtaagtttgtgactttgaagattggcgatttactatttacgggcacgcctgccggagtagggccggtcagtatcggtcagcacttgcagggatatcttgaaggagaaaagctgcttgacttctacatacgttgacccgtgtattctttatttgactcatttattaaatagcttatgaaaataagagtaggttttggcttcgacgtacatcagttggtcgaaggtcgtgaattgtggctgggcggtatccgtctggaacattccaaagggttgttgggacattcggatgctgacgtattgctgcatacggtttgcgatgccttgttgggagccgccaatatgcgcgatatcggttatcattttccggatactgccggagagtacaagaatatcgacagcaagattcttttgaaaaagacagtggaactgattgcgaccaaaggataccgtgtcgggaatatcgatgcgactatttgcgcggagcgtcccaaactgaaagcccatatccctttgatgcaggaaacgatggcagccgtcatgggaatcgatgcggaagatatctcgatcaaggcaactacgacggagaaactcggttttaccggacgggaagaaggcatttccgcttatgctactgtgttgatagagaaggactgacaaagcagattactaacccccttaaacaataaatagtatgaatcgaactttaaaattattcttagcactggtctctttgtgtatgaccgtcttctgcttcgcccaaaagagcgaattacgcttcaataaagacggtaaatttaaaatcgtacagttcaccgacgtccatttcaagtataagaatcccgcttccgacatagcattggaacgtattaatcaggtactcgacgaagaacaacctgattttgtaatcttcaccggagatgtcgtttattctgctccggcagataaaggtatgttgcaggtgctggaacaggtatcgaagcgtaagctgccgtttgttgtcactttcggcaatcatgataatgaacagggaatgacgcgggaacagctatatgacatcatccgtcaggtacccggcaatctgatgccggatcgtggctcggtcctttctccggattatgtcttgaccgtgaaagcctcttccgatgcgaagaaggatgcagccgtcctgtattgcatggactctcattcttactccccgctgaaggatgtgaaaggttacgcatggctcacgttcgatcaggtcaactggtatcgtcagcagagcgcagcctatacagcacagaacggcgggaagccattgccggcacttgctttcttccacattcctgtgccggaatacaatgaagcagcttccgacgaaaatgccatcctgcgcggaacccgcatggaagaagcctgtgctccgaaactgaatacaggcatgtttgctgccatgaaagagtccggagatgtgatgggaatattcgtgggacatgatcatgacaatgattatgcagtgatgtggaaaggaatcctgttggcttacggtcgtttcacaggcggaaatacagaatacaatcacctgccgaacggtgcccgtatcatcgtgcttgatgaaggcgcccgcacgttcacttcctggattcgtcagaaagacggtattgtcgacaaagtgacctatccggcaagtttcgtcaaagacgactggaccaagcgttaactattgccagcttcacattgctgaggcgggtatatttggaaccgtagctttcgaacaggcgtgacacccgcgccgatgctacatatataatttctcccgggcgatattcatgctctattccggatagagtgcatgataccgtactgggagtttttgatgggatgctcatcgtcaccaggttgccgctggcgtcgttcagagtcagtatctgcttgacgaaaaattgcggagtcgttccgtatactcttgttttatacggatcgtcttccaggcgtacccgcatgactttcaactttaagtccgtcagcttctcgttcacttctcctagatagcggctttttcggcgtacctctttgctcttccgcagcatcacgtccagatgtaccgaatgatatgcctgcgctattttgacgaaacgctcctgtttgggaatcttcggagtaaacttataggcgatccagcttagataggcaggatcgactttgaggatttcgtgcaggaagtgtcccctgtatttgccgaaaaagatgaggtcgtcaccgttgctctgcattctcttctcgttgtaatccatcaggatgaggcaccgtcgcgaataataaaacatggtgcttgctatccgcagggactcgttgatatccggagataaatcgtgtatatagagaatcgattgcttttcgggcaggggagagtagagccaaagggaatagttgggctttcccggtcggggcaacaccaccagataaacccctgcctctttaaaggaggctctgcctcggttgtattcattcagtttggcatacaataaggcttgctcgctttcggaaattcccggtaattttggattagccataattgttctcgcttttggtataattcaaatatactgattttctttcagaaaagcaagccttggcgggagtttcttcgaataaagcctgttggtgaagttaactcgtttccgattcagatttgaatcaaccgctgattcgcattaatagctaataaagcgaaaataaaaattaagtccgaagattattcttctcataacatcataaggtgttcagatcaatgacacaaaaagagaaaggtagtattgtagcaataattcatcgatttacctagaaaataaagaatctttcaaaatcagcacccacatctatacgaaagactttgactaattatgcggtaacagccaatcatttattaataaattctttcatcgtttattataaacgtcctccaagtttattataaactctaatttcgttattcctgcaataaacatccattttaagcaacaaaaagggctgcaattcccataaggaatcgcagcccttagcttgtatcagactatccaacaagcattacccggagtgggaatgcctgcaatctgttattatataatacttattattgctcatttttcgtctatattatcaatgttattgaatttgcttccggtttacacttacaaagatacaacattaaaagcggtttgtcaagtcctccatgcttctttcatacatctgattacaaatcatacggatttgcgccgaatgatagtcagtagtatcttgaatcatttttaaaccgttttgaataattaaagagacagtaggaaatgattgtctgatgatggcaatggggctgttgcctgttcattcattaggggacacaaacttttcatttccttttttatggctgtctgactataatcttgtacttttgtattcttctaatgattggaaattcggatgaaagaacgaaataaaagagtattggttggcatgagtggcggtatagacagtaccgctacctgtctgatgctacaagagcagggatatgaaatagtaggagtcacgatgcgtgtttggggagacgagcctcaggatgcccgcgaactggctgcacgaatgggaattgaacattatgtggctgacgagcgtataccttttaaggagaccatcgtgaagaactttatcgatgagtacaagcaaggacgtaccccgaatccgtgcgtgatgtgcaaccccttatttaaattccgtgtactggcggaatgggccgacaagctggactgcgcctacattgcgaccggacattactcccggctggaagagcggagcgggcacatctatattgtagcgggagatgatgataaaaaagatcagtcctacttcctatggcggctggggcaggatatactgaagcggtgtatcttcccgttgggcgactatacgaaaataaaggtgcgtgagtacttggcggagaaaggatatgaagctaagtctaaggaaggcgaaagtatggaagtctgtttcattcagggagattaccgtgattttctgcgcgagcaatgtccggaactggatacggagatcggtccgggatggtttgtcaactccgaaggagtgaagttgggacagcataagggagcaccttattataccatcggtcagcggaaaggactggagatagccttgggaaagcccgcttatgtgctgaaaatcaatccgcagaagaatacagtgatgctgggagatgccgaacaactgcagacggaatatatgctggcggaacaagaccggatagtagatgagcaagaattgttctcttgtgagaatcttgcggtgagaatccgttaccgcagccgaccgataccttgtcgggtgaaacgcctcgaagacggacgcttgttggtgcgtttccttgagacggcttcggctgttgcccccggtcagtctgccgtgttctacgatggacggcgggtacttggcggtgcgtttatcgcttcgcagcgggggatcggactggtgatcatagagaataaagacaaattgtagaataaaataaatagagagatttagatgaaaagattagtattagcggcattgatcctgactacagcggtgggagcatctgctcaatttacctctaccgataccttgaaatatcggatcagcctcacagataaggctgcaaccacttattccatccagcaaccggaggagttcctttccagaaaatccatcgaccgcaggttgagacagaagctggctatcgactctaccgacttgccggtatgcaagaagtatgtagatgccatacgaaagaaaggcgtccatgtgcttgtcaccggaaaatgggataatttcgttacagtctcctgcaatgacagtatgctgatcgatgaaatagccaaactgccttttgtccgttccaccgagaaagtgtggcagggaaaagtgtcggcagttaccaaaagagattcgctgatcaatgatccgcagcgttcggacagcctgtatgggcccgctatcactcagattgaaatgagccgagccaaccttctccacgatgccggattcaagggacagggcatgacgattgccgttatcgacgccggatttcataatgcggacagaatcgaagcgatgaagaatatccgcatactcgggacacgcgactttgtgaaccccgaagcggacatctatgccgaaagcaaccacggtatgtcagtactgtcttgtatggcaatgaatcagccgaatgtcatggtcggcaccgcaccggaagcctcctactggttgcttcgcagtgaggatgaggcttccgagcatttggtagagcaggattactgggcggcagccatcgaatttgccgatagtgtgggcgtggatgttgtgaatacctcactgggttattatacctttgacgacccgaccaagaactatcgttaccgtgacctgaacggacactatgcactgatgtcaagggaggcttcgaaggcggcagataagggtatggtcctcgtttgcagtgccggtaactctggcagcggctcatggaagaaaatcactcctccgggcgatgccgagaatgtactgactgtgggtgctattgataagaagaagttactggccccgttctcttctgtcggcaatactgccgacggacgtgtgaaaccggatgtcgtagcagtcggcctcaaggcggatatagtgggcacagacggtaatcttcgtctggccaacggaacctctttctcttctcctatcatgtgcggaatggtagcttgcctgtggcaggcctgcccgaggttgaccgccaaagaagtgatcgaactggtgcgcagcgtaggcgacagatccgattttccggacaacatctacggttatggcattccggatctctggaaagcataccaaatgagcaaagaataacgaacggtccgctattcttcgttgttaggctatatcaaattcgcatctcattatagaaatgtgtcattcatttatcgttaattatgcctatggattctctttccctactagagctaaacgcgcttgtccggcgaagtctggagcaatgcctgcccgatgaatattggatacaggcagaactgagcgatgtccgttccaacactaccggacactgctatctggagtttgtgcagaaagacccgcgcagcaacaatctcgtagccaaggcacggggtatgatctggagtaatatctaccgcttgctgaaaccttactttgaggaaactactggacagttatttgcttccggcatcaaagtcctggtgaaagtaacagtccagtttcacgaactctacggttacagtctgactgttctcgatatcgaccctgcctatacgctgggcgatatggcccgccgccgtcgtgagatactcatgcaactcgaagaagaaggagtactgactttgaataaagaattggaaatgccggttcttcctcaacgtatagcggtcatttcctctgccaccgcagccggatacggagatttctgtcatcagttgcagcacaattctggcggattctttttctataccgaactgtttccggcgttgatgcagggcaatcaggtggaagagtccgtattggctgcattggatcgcatcaatgaccgggtgaacgagtttgatgtagtggttatcatacgaggcggaggggcgacttcggatttatccggttttgatacgtacctcttggcggccgcttgtgcccagttcccgttgcccgtcatcaccggtatcggtcacgagcgggacgatacggtgctcgactctgtggcacatacccgggtgaagactccgacggctgctgccgaacttctgattcaccggatcaccgaatcggcagatcatctggaagagttatccgcccgtctgcaacaaggggcgtatgccctgctcgaacaggaaggacggaggctggaaatgattcagacccgcatcccgaaccttgttcaccgaaaacttacagatgcccgctttgccttgctggcagccggaaaagacttggcgcaagccactcagaccctgttgtcccgtcatcgtcaccgactggaacttttgcggcaacgtgtggcggatgcttctcccgacaaactgctgagtcgtggatatagcatcacgctgaaagacggaaaagcggtcacggatgccgcttcgctgaaccccggagaccagttagtgacccgtctggctaagggaagtttcacttccgaagtccggctcgatgagcattattattcatcttaaatacaataaatatggcagctaaaaaagaaacatactctcaggcaatggagcgtcttgagaagatagtccgtcagatagacaacaacgaactggatatcgacactttgagcgaaaaaataaaagaagccaatgaaattattgccttttgcaccgagaaactgacaaaagcggatcgggaagtcgaaaaattgttgcaagaaaggcggcagtctgaataataaaagttatttttgcgaatcaaagcgtaaaataaactaatacataacgatatgaaagaaatagactgggcgaatctgtcgttcggatacatgaagacagattacaatgtgagaatcaatttccgtaacggcgcatggggcgaactggaagtcagcagtgatgaacatctcaatctgcacatggcagctacttgtctgcactatggtcaggaagcttttgaaggtttgaaggctttccgcggcaaagacggtaaagtacgtatcttccgtctggaagaaaatgcggcacgtctgcaatctacttgtcagggcattctgatggccgaactgccgaccgaacgtttcaaggaagcgattctgaaagttgtaaagctgaacgaacgtttcattccgccttatgaaaccggtgcttctctatacattcgtccgttactgatcggaacaagtgcccaggtaggcgtacatcctgccgaagaatatatgttcgtggtatttgtaactccggtagggccttacttcaaaggtggtttctctaccaatccgtatgtgattatccgcgagttcgaccgtgccgctcctcatggaacgggtatctacaaggtaggcggtaactatgcggccagtctgcgtgccaacaagaaagcgcacgatctgggctattcctgcgagttttatctggatgcaaaagaaaagaaatatatcgacgagtgtggcgcagcgaacttcttcggaattaaagataatacgtacattactccgaaatcatcttctatcctgccttcgatcaccaacaagagtctgatgcagttggcagaagatatgggcatcaaggtagaacgccgtccgataccggaagaagaactggaaacgtttgaagaagcgggcgcttgcggtacggctgcggtaatcagcccgattcagcgtattgatgacctggagaacggaaagtcatatgttatctctaaggacggcaagccgggaccggtctgcacgaaactgtataataagttgcgtggcattcagtacggtgacgaaccggatacacatggttgggtgacgattgtggaataattgatctttaagtataatctcttttaattgcgtaattactatgttgaaacaaaattcagagttgcgtgctcaagcacgtgaagcccttcgtggaaagtggcctatggcagccgttgctgctcttatttattcggctatcgccggtggtttgtcttccattccttttattggatggatcgggtctttgttggtcggactgcctgttgcatacggctttgctattttgatgctggctgtattcagaggagcggaagaggttgatctgggagtgttgttcgcaggatttcaggaatatagtcgtatcttgactactaaactgctgcaggctgtttatactttcctgtggtcattgctgttgctgattccgggtatcattaagcattattcttatgcgatgacggactatattctgaaagacgaacctgaattgtgtaacaatgctgccattgaaagaagtatggcaatgatggaaggcaacaagatgaaattgttcctgcttgatttgagcttcatcggttgggctatcctttgcctctttactttcggtatcggattcttcgttttgcaaccctacgtgcaagtatctcatgctgctttctatgaagatttgaaagctcagcagggtggtattaatatcaatgtagaagtgactgtcgaaagttgataagcgaataaatatcattctatagaatggagtacggagcaatctgtactccatttatttttgtagtttacgccaaaagtaagtacctttgcgtcctaatcagtaatgagatgggaaagaataaattagagaagtttgccgatatggcgagttacccgcacgtgttcgaatatccttattcggcggtggataatgtgccttttgacatgaagggaaaatggcatcaggagtttttcggaaatgatcatcctattgtgctcgaactgggctgcggacggggtgaatataccgtcggactgggccggatgtttcccgataagaactttatagcagttgatatcaagggttccagaatgtggacaggcgccacggagtccttgcaggcaggaatgaagaatgtcgctttcctgcgtacaaatatcgagattatcgaacgcttttttgcagcaggtgaagtcagtgaaatctggctgaccttctccgatccgcagatgaaaaaggctactaagcgtctgacttccacttacttcatggagcgctaccgtaaattcctgaaaccggatggaatcatccatctgaaaaccgacagtaactttatgttcacctatacaaagtacatgatagaagccaatcagtttcctgtcgagtttatcaccgaagatttgtatcattcggatttggtagacgatatcctgagtattaagacttactatgaacaacaatggctcgatcgtggtttaaatatcaaatatatcaagttccgccttccgcaagagggagttttgcaggaaccggatgtggaaatagaacttgatccgtaccgtagctacaaccgtagcaagcggagcggactgcaaacgagcaaatgataagtaataagtaacaagtaataagtaacaagtaataaatagtaattgggtggaactatcaattttccactctcaattctgaactaattatgactctttatccgaaattaatattggatgcgctggcaacggtgcgttatcccggtacgggaaagaatctggtggaagcggagatggtcgccgataatctccgtattgatggcatggcggttagcttttcattgatatttgaaaagccgaccgatccgttcatgaaatcaatgttgaaggctgctgaaacggctatccatacgtatgtatcaccggatgtgcaggtaactattacaacggaaagcaagcaggcagcccgtccggaagtgggcaaactgcttccgcaagtaaagaatataatcggtatttcttccggtaagggaggggtaggtaaatctaccgtatccgcaaatttggcggtggctttggctaagttgggctacaaggtcggcttgcttgatgctgatattttcggtccttccatgccgaagatgttccaggtggaagatgcccgtccgtatgcggaaaagatcgatggacgtgacttgattattccggtagagaaatacggtgtaaaactgctttctatcggtttcttcgttgatccggatcaggctacactctggcgtggcggtatggcgagcaacgcattgaagcagctgattggcgatgccgactggggtgatcttgattatttcctgattgaccttcctcccggcacaagtgacattcatctgactgttgtccagacgttggcaatgacgggggcaattgttgttagtactccgcaggcggtagcgctggcggatgcccgcaagggaatcaatatgtttacgaatgataaagtgaatgtgcctattttaggactggttgagaatatggcttggtttacgcctgccgaactgccggagaataagtactatatctttggtaaggaaggagccaagaaactggcggaagaaatgaatgtgcctctgctaggtcagattcctattgtacaaagtatctgcgaaggtggggacaatggtactccggtggcgctggatgaagatacggtaaccggtcgcgctttcttgtcattggctgccagcgtagttcgtcaggtagatcgccggaatgtggagatggctccgactaagattgtagagatgcacaaataagtgctcttatttactttaaatataaaacctcccgatgatgttacttttgtctgtcatcgggaggttgttttatcttatggtatatattggtatagcttgttgctaccttgcgattggtgattctacttttccaatgctttcatcaattgttctttcatggtatccactccggggaatccggtctgtttataagtgatgtttccttctttgtcaataacaaagtaagtaggaacgccccggatactgaacttctcgcgcagatagctccactgttcatccgtcacacggaaatgttctccgtgaatgtcaggaatcatgtttctccaggttcccagcggagacgtttcacctgtgatgtaaaggtagatgatgtctttgtctttcagttcttttttcatcgggagaatctgtttgttggcagaccggcatggaccacaccaagttgcccaaaagtcaactaacagcgtatgtccccggaatttggagataatggaggggaataaatcttcattcgatacttctcctgtctcattaacggtgaatcctgttttcttcttgttgatttctatttgtttcagcaggtcgttgttcatagccagagccatgtcgttgtatgctgcgggcatcgttgccagttctgccttttgcttatcgttaagtggattgagatctctcatggagactccaatcatctgtgccttcagattttgtattaagtaactggcagctgtatgataactcaggctcttaagaatcttatcatctatacctatacggcgtatgatgtcaaacagtatcgggtatctgctgttgtaacaggctttaggtgaaaggatatacgtgaagtcctgaagactttcataatatccttgcggaatatcaatcttagtctcggcatagtatttatttgctttttctccttccagcccattcgtcatgatatgagctaatttcaagttcctttctgtttcgataatctttagtgcggcagacaattcgaggtctgtattaataatctccttatatgcagggcttcctttcgactgtgtgatttgttttctgaactcagggagtcgggcaagtatttgaactttatattcttcagctgttttaccattcagctttttaatctgttgttggtattcttcataactattgccttcagtgaaactgaaactcataggatgatctgccagctcttgctgtactccggctaaatatcctccgtaatagatttcttttccgtatggcttttctgcttgacggagatgtgactgcttgcgggcattttcgcgaagattgataacgaccgaagtggtttcccccggtgctaataagtagctgacagctccaaaaggaaacctgatcatgcatggggtgaccatgaagacattcatctcatgataaaacgttccgtcatcctggatgcggatttttccttcctgagcttcgtctcttattacatcttgaaaataaagactgcctttgttgggcatccctttttggtagtcaaggattcttcctttgagaattgctttggcgtatttaacgactggttcgggcagcgtcgttttatggtctgctttggtgactgtaacgtctttaggcagtttgaacttgctgaatgttttcttgtccagctgtatgccccatatcttatatgcaccctcaaagtctccttcagagaaatccaggcaagtcacgttttgaggaatgggggggaaggttaattgaaattcggcttcgccggactcgggcatccagaactctttgtccagcgtaatgccgattcccttccggacagggtataggttgccattgttgtctttcagtacactgccggttgcgatctttatccagtatttgggccgatagaaagctttgatatacacagtggtgactgtgtcactcatgacaattttgtctatctctatacttgaggaactctgagctaaaaagggaggacgttctacgattctgtctttagcttgtgtcatacaaagtatgcttagcagcaaacttatcattaatgcgaatcttttcatacgattaggcttttatctccaacaaatgtaatcatattattgtaattatctatgcgaaaacagaaaaaggagcagaatcgtttacgattgctccttttttctgttatttatttgttaggggaataatgatattttcggttttgcttattgaagtcggaatgtaatagggaatgtatattctacggcaacggcttgtccgttctgttttcccggttcccacttaggcataccccgcactacacgaatcgcttcagcgtccaaccatgccgacgcaccttctaatatttttatattcgacacgttaccgtcttttccgatgacaatctggaccagcacttttccttgttccttattctgctgggccatagtcggatattttatatttttggctaagtagcgcattaatccctcctgtcctccgggaaatttaggcatctcgtctacgactttgaaagttggttcattattgggtgtggcttctttaggaccatagcccaccactacgacctcttcaaacttttctattgctactgcttcgggtgtttctgccggttttgcaggttccggaccggacagacggaaagttacgggaaccgtaaatcttacgttcacagcttgtcctctttgcttgccgggtttccaattaggcatggcagcaatcactcgttcagcttccttgtcaagataggggtctacgcctcgaactgttttaacgtcggaaatgctaccgtcttttttgactacgaacatcacaatcacacgtccttgctttccattttcatgagctgttgccggatatttgatattcttggcgagatattccatcagtgctgattgtccaccggggaagtcgggcatttcttctacaacttcaaatacgacagaatcatttacagtagcacttttaacgggtgccggagggggaggaggagctacctcttttgttttctgcgttccttttttatcctgtaatgtcgctactcccgtcattccatcgggaagttccggaccattggcgagttcggtttgcgaaacaccttgttcttccggtgctgccatcatttctttggcaaattctttcgttgtacgagctactacttcgatgttgctgataatcatcaacaaggcagccaagggaaggaacatcagatatttagtccttcctatttctttggttcttcgtttattcatcattttgatacgatttttaagtggtaaaacattgaaactattagataaatttgctgcagccttgtgatgtgccagtcccagcaagtggtactggtatgatttactatcatgtcccgtctctaatacccggtgatctgccatgtattccagattacctctgacttcccgtttcatcagccagacgaagggattgaaccagcagaaagtacacatgatctcactgacgagtacatctgctgagtgatattggcgggcatgagtctcttcatgcgtgattatttcgctgatctcagattctgtatgcgattccggatgtatgaatatccagtggaagaaggaaaagggtcctgtacctttcttcaatatgtgtacacgtgatccttgtatcgtgcttttcgggcataggaaatgcaatcgtatgatactgcccagctggatcaggaagcgtagggtaagaagtaatacaccggtccagtagataaatcccagaatttgtgggattagctcctgccaattggccgttgtttcctgtggtgcctcgatgatttgctccggaagtatgatcgtagcataaagatctgccattgccaccatcggctcctgctcctttatccactcttgaatattcagtaagggatagagcagagagatgccaaagaagcataacagagcggtccgtcgccagtggaagaaggtgtctttatgaaaaaacaaccgatagaaagcgtagaacaatgcgatggctacgtttatctttaagaaataggcaagttccggagtcatatcgataaagtttcagtttatttttcttttcctttctctatcaggtcgataatgtccttaaggtcatccgtagatatcttctggtcctttgcaaagaaagaaaccatttccttataggagttctcgaaatagttgcggacaactccactcatgaagtggcgtttgtattcattttcacgaatagagggagtatactggtaggtgttccctatatgtttcgatttaacgtatcctttccgttcgagatttttcacgatggacgcaacggtggtataaggtggtgccggttgcggaaacttggatacgatgtcctttacgaaacagtcttgtaactcccaaatgtagatcattacttcttcttcttgtatagttaacttttccatggagatgatgtttaattacgattctttcgcaaagctacgaatatttcgtaataaagcaatagctagtcggttaaatattgtaaatgcctgtttgggatggggtgatttgtgggtaaaagcccctgattctcgtaagcatgaaaataatgtggataaacgttatattcatccaaataagcaatctttaggacatttaggtgaacaaaaagcctatcgtggcttttttatataaaataaatgaaatacttttgtagagtataaaacgtatgttaataaaaggagagtgcgtttcaacacaaagcaaagcttgaaagattccccgtactcgataatgaagctattaactatgcagcccggagggaggagggaggcaaactaaaaaatgactgatatgaaaaaaggtttgatttttgtgctgtttgcacttgtttctatcgtttcttattctcagatttcctggaatgctaaagtaggtatgaacatgagtaatttcacaggagacgctgatacggacatgagagtaggttttaatgttggagtgggaatggagtatcagtttactgatatgtggtctattcagccttcgttgatgtttactcagaaaggtgcaaaactgggtgatatcaaggctaatccgatgtacctggaactgccggtaatggctgctgcaagatttgctgtggtagacggtcaaaatgtagttgtaaaagccggtccgtatctggcatgtggtattgccggtaaatacaagatagctggcgttaaaagtgatttctttggtgatgatgcagcgaaaagatttgattttggtctaggtatgggcgttgcttatgaaatcaatcggttctttgttgacttatccggtgaattcggattagttaagatgtacgatggtgacggctctcctaagaacatcaacttctctatcggagtaggttacaaattctaattgaattatattctctttataataccattcataaagtcctctgcccaatagatggagcggaggactttttcatttcctcccataaagaaatttctcttcctataaagaaaaacgatgtatacttccgaagaagcacacatcgtactaaactctctctcttaattgtctcaatcggtcatctgtttggccagattctctttttctttcagttctttatatctctctatggcgtgtttccggctcatcagtatttgccagcggtatacccagcaagtggtgaggaaataaacgcctgcctgtatccacaaagctttgtattcaaaggcgacttcgcttaaggtagctcccatattattgatcttcacaaagccgttgatgccgaatgtggacgggaaaatgtaagaaacatatttccagaacggaggaatggcagctcccggccacgaaataccggaaataaacagcaacggtacggaggtgaatacaaaaatcagcatacaggtttcccggttgcgaatggcgatggaggtggtcattgcaaagaaaatgcaggccgccagatagggggcgacgaataataccagtgaaccgggttgcccgatttggttgaggctgaatagtcttggcacgatatgcagcacgtaaaatgataccagtacgtacacaaggaagtaacttagccccttgccaagtacaattcgcaacgttccgttataatgccggttgatgggaacaaggtctttaaaccggttgttttcccgggcagttcctgctgccagtccgattccgagcaatagtgtctgctgtatgatcagtaccaatacggcaggaatcaggaaagcggcaaaaccggctgtaggattaaagatggaaatctcttcatattctatcggataaccggtgatttcgtcctgtcgctcggtcgtgttcccgctacgcgcgatctttatatctttattcatatccagtgatacggccgtattggcgatcagcatggatttatagtacagcaatccgctcatgtcgcaatagatactgacttgcgtctgttttcctttggcgatgttgtcgctgaaatcagatgggatatagatgatgccgtatgcaagccggttcttcagcatttgcttggcttcttccatatcggcacaataggcaacaatctgaatgtccggtgtggcatccaccttccggagatattcgcggctcagggatgaatgagagtcatcgactacaacggccggaacttctcgtaccacttcattgtcatagataaagctgtacagtaacggatagcccagtgggacgaggataaagaaaatcagtaccccctggtcgcggaaagttgtctgaaactctcgtttccagatataaaacaggtcgttgatgccttgggctatcttgtctttaaattttatatctttcatcagggtatgtatttatagtaaaccaatgcttctttcaagcggtgaaccacaaagaagggaagcatcatgaatattaataatgccatatagttggaccatgagtaagccatgctgtatccgttgagcgcctgatctacataaatcaggaaataatgacgtaacggaaacaggttgctcaaggcctgcaaaacaggattcattgccatcaccggaaaagaaaaaccggagatggagaatgaaatcactccccacaaggaggcaaaacttaatccgaggcggagtgtaggcagtgtacctatcatgacgatgccgcaacactgggatgccaatacaaggcagagcgtggcgaatatcatcgggaagatgccactattgcaggggaaatgcagaaaaccatacaggtatacattatagaatatccccattatgaaaaagaccaccgtatgcggaagcagtttgcctgccagtgcgatgtaaatggagttgttgctcatccgcaaccattcacgggcagtgcggtctttgatttctacaccaatagaataaacggtgaccatgaagatgagcaacatgagtactcccggtatcagtgtattgcacaggtataccgaatagttcagccacggattgttcagtggatgcgtgtcaatcacgatcggttgcaggaaccccattgcctgatcttccgtagcccctttggcgtacagtacgctcctagccgcagagccggcggtgagttctcccatcattttcatgtctctgaatagtaaagaacctgcaatcagataggagtaattggtgtagaaagagattttgggctgccgttggctttgtgcctctgccgacaagcctttcgggatatagaagaaaccgtagatcttgccttcctgcacagcgatacgcgcatccgtcacattgctgtaatgagctacgacacctgtttgcgagaaagcatccagattgcggacaatgttgcgtgaagtagacgagtcgtccatgtctaccacgcccgccggaagattctgcggaagtcccgaatccatcagggtcgtgaaaaataggtagcagaacaatggagcgatgaccatgcaaaagagatagagcgggcgtgatactaaccgcctgcactccctctgcatgacttgccataaggctacatatttcttctttctctctttcatgattatttgttaatgataacggacatacccggacgaagattttccactttttccatcggagaagctttgacttcaaatgtcttcaggtcgaactgaccggtagttttggttgctttccaggcggcgtaagtacctaagtctttcagatagtatactttgagtctgactgttttattatccagcgcgggaacaacagcttcaaattctgctcccatagtcaggtttttgagcaagtcttcgcgtacgttgaaagtcacccacatatcattgagttcggctatgttcatgataggagcacctgtgcctaccagttcgcctactttcgggaaaatctcggaaacttctccggcagccggagcaatcagataggtttccttaatgtaagattctacttcggcaacagctcctttggcacggttcaccaacgcttcggcagccatcttgtcttcacgttccgcaccgttctttgccatagtatattgtgctttggcagctttctcagtagcgatggcagcgtcgcgttgtgcggttacttcgtccagcttttgtgcgggcatcactccttgttcatacaggttcttgactctcttgtatgatttctcggcaattgtaacaccggcctgagctttctgccacatttcataggctgcctgaatctgttcctcacgtgcacctttgattgctttttcgttttgtgcctgagcggcagcttcggcggcacgtgcctgctccattttagccactacatcgggggcttccagaatagccagtgtatctccggcatttacgctttgtccttctttcacacgaaattccagtatacgtcccggaactttgcttgaaacgcggtattcggtaacttcagcctgcccctgaataatttcaggacctttgcggagcatgaaaaagccaacgactgcaacgatggcaataactcccagtaaagtaagaaatgcaagcagcatattgctgttttgtgattttataggtgccatattattgatgaattttaaattacgaatgataaattgattgaatacctcagtcttataattgtcaattgtcaactgtcaattgtccattatttcagcgttcccaaagacttcttcagataaatctccgtcagcttcacgtcgatttgtgcgtcaatcttttccgattgggcggacagccatgccgtttgtgcttccaggacattgctggtgacaatgaccccttctttgaagcctaaggtggcataacggagattttcgtcagccttttccatattcttggttgccattaccagttttttgctggcttcctttactttaaaagcggattggttaacttgcaattcgatcttttctctcgcatcctgaagctgatattgtgcgattcgtgcttctgccttggcggctttggtcttgtaaatgccttccccccaatgccagataggtatctgtaccataacgcccacattccacattcctttgaatttattctcaaagctgttgaatacggaaggattggtcaccatataatttcccatcaacgcaatggacggaagatgttcggcgcgggtaacatttattttctgtttataaatctgagtagccagttcaagactgcgtatctccggacggttggcgtaagcggtggacatgtcgaagtgggtctctggtgtgagcagtggaatgtcctccatattttcgtctgccaacgtgataggagagctgagatcaatgccacatagttgacacaacaacattcgggccaggcttaatccgtcttccactttagtcagtgtcatttccgcttcgttgactttcacacgtacggacaaaccgtcggcttttgtggcaactccttcggcaatcatcttttccacatcgctgtccagctgctgcaaaagtttgagatagccttcggccagtttcttcttgttcactaaggatatgacttgccagtaagcctggtcagtgctcatgataacctcctgcatgcctccttgatgttgctgttgcgctaattcttcggcatactttgtgattttattatatgcacggattttgccgcccatgtataatggctgtgtcagcgtgatggcacctgcatatacatttcttgtatctgtgcggagcgcatccaccagtgagtttcctgcctggtcgagggcgggcaaggcagctcctaacttttcacttaaagaagcgataagcggtctcaactccgggtgtgcggtagcaatctctgtagccgtctgttgtatcggaccggccagattggtccccaatcccgaaagcgccgctttctggtcattgttcaataatgaaaattctttttgatttctcatgtaagttcccgtagccgagaaactgggcaggtagttggtaaatgcagctttgtgctgataatgagcggcatttattttttcattgcttatcaacagatctttgttgttggcaagagctaatgcgcggcaactatctaggcttaggaagctttgcgcttttactataaaagtcaggctcaacagaattgtcagaagaaatagttttttcatcgcatcttacatattaataaggtgatacttcttttttaaataaccccgttatcatataaattgtttattgaaatagttcatttttttgtacttgttgacttaaacaataattgcataaacaacgatgcaaatgtatgtgctttctgtgaaaatgcaaaatgaattagctttttttaaatgcttctctttggaaaatatgctatacttgcattttgaaacatgataaacatactataatgttattaaatctgacagaagaacaaatcactcaactcgctccggacgctgcgtctgtcaaagcaggaaaagggctggcgaaccggactaagtgggtacttctggagcatagtgaccgcgccatctggggacactgccaaggaagtggaaaaacgccttatcaaacagtagttgatacaaagaatattgcattcaaatgttcttgtcccagccgtaagtttccgtgtaaacatgggttggggcttttatttatgtatgcttcccatgctgatcttttcaaggaagcggaggaaccggactgggtaacggcatggctctccaaacgtgaagagaaggcggagaagaaagagcagaaagagaaatcggaaactccggtggatgaagcggcacaggccaagaggcaggccgtgcgtcatcagaaggtattggccggaattgatgatcttcagatctggatgaaagacttgctccgcaacgggctgctgaatatcccggaaagagcacatacactatttgaacccatatcccgcaggatgattgatgcacaggccggcggattggcgggcaggttacgatcgctacaggaaatcaattactatacagacagttggaaatatgagcttaccgacaaattgagtaaactgtatcttctgacagaaagttataagaatctggattctctttctgctgagtggcaaacggaaatccgtactcaggttggatatccgcaggcgaaggaagaagtgatgtccggcgtaccggtggcagaccaatggatcgttttgcataccagaagccggaagataaatgagctgcggacagaaactttctggttgtacgggaagtccagtcaccgtatggccctctatctaaactttctggctcccggagcgttgccggaatttaatctggttcccggtggtgtctatgaaggagagttgtatttttatcagggtgttggtgccttgcgtgccctgccccaaaacatgaaatggctggatagtaccttcctgccttcattgtgtgccgatataccggttgccatgcaatcttacagagcagttatacagactcatccgtttgcggaggaagttcctctcttggtggacaatgtcagactggtaacaagcggaaatacgcactatctgcaggatgccggaggtatggccattccggtgcatatcgaagagactgcacgtgttgacatactggctataacaggcggaaaacccttctcggcttttttgttggcagacgccgtttcctgtgaattgaaaacaatctggtatcaatctgaattttatttttggaaagatgaacttaactgatcatatcatcaatgtggcattgcttggcactgccacccgtgaactgataacgactgattttccggaagagttgcaagaaactctccgcgacattcaggcgaaagcagaggatgcggaagctctcttctatcagcagtccgctttgggctttgcctttgcacgtgccggagtggaagcgcaatccattgcaggagttacaaatgtgacagaagctccggaagaagacaaaccttacttcctccgtgaagtgggagagttgcttacttccctgtatctcaataaaaatcagtatcttttgctgtatgcttatcggagagctgccgacaaaggaaaattgatccctcctgcctatctgcaaactttattgcgaagagcttttgaccggaataatctctacaggtatgaggaacagcactggctgtctctgctggcagggcaaagaggacgttggcttcttccgcaaatgggatttcctgtatggggagaatccggcaacgaaacttgggaaactgcctctcacgaagaacggaaacgaatgttgactaacctgcggaaaaatagtccggagcaggggcttgccttattgcagaccgaactgaagaatgagtcggccgcccatcgggatgaactgattcagtgtttgcggtgggggttgagtaaatcagacgaagcattcctgcaagagatcgtggcgactgaccggagcagtaatgtcaaagaaacggcccggcgattattgtgtagcctgccggactccgaactggtgaaaatatacgaagaattattgcgggggaaattacatttcaatttccttttgggatggtcgtatgataagattgaatttacccctgaaatgaagaaactgggacttgaagaggtgagttccaataaaaacgagaaggatgatcgtttcttgttacgccagttggcggaacgtgttccattaagtttctggagtgagttttatgactgtccgccggagaaggctgccagcaaactggcgaagaaccctccttttcagaaactgttcgacctgtcgaaaccgatcctgaatttcaatgactccggttgggcatatcataccttgaaggagaatgcggatgaaaaaatggcggacgcgttgatgggtttattgccttccttccaacgggaggaaatagcttttcagtcggacagaggcggctatattccggatagctggttcaacaaagacggcatcggatggggaataaaattctccacccgtgtattccagcggatgcttcggaataattactatctccctaaggagacagccgaacaactggcattatacttcccgtccgagatgagaaaacccatcgaacagacagcgctttcaacggccgcacaagagaataatacctccacccgtttttgccggttgatgatggaatacatggatttgaagcagagaatagataccttattaaataatgactaataaaaacagaaagaagatatgagcactttattaagacaacatgctgaacagcaatttgcagaagaacttcacgagttgaaacagaatgaaacaaatcccgttccggagaattgggagatgtctccgcagtcagtggttacctacctgatgggcggtaaattgaaaaacggatttgaagtttctcctaaatatataggtaaccgtcgtctgatggaaatagctgtggcaacccttgtcaccgaccgtgcgctactgctttacggactgcccggaactgcgaaaagctgggtgagcgagcatattgccgctgctatttccggtgattccactttgatagtgcaggggacggccggcaccggtgaagaagcgatccgttatgggtggaactatgcccgtttgctggcggaaggtccgagtgtgggagcattggtgcaaactccggttatgaaagctatgcaggaaggtaagataggccgtattgaggagctgacacgcatcggttccgatgtgcaggatacactgatcactattctttctgaaaagacattgcccattccggagctgaatacagaagtacaggcaatccgcggtttcaatatcatcgctactgctaataatcgggataagggagtcaatgatctgtcaagcgccttgaaacgccgtttcaatacggtcattcttcccttgccggattctattgatgaagaaatagatattgtgcgccgacgggtagagagctttgagaaagtaatgcagctcccggctgaaaagcctgctttggaggagattcgccgtgtcgttactatcttccgtgaacttcgtcagggcgccactgccgacggtaagacgaaactgaagactccgagcggaacgcttagcacggcagaggctatttcggtggtaaacaatggactggcgatggcaggttatttcggtgacggagaaattcatgccgaagatctcgtatccggtattttgggtgcagtggtcaaagaccccgtacaggataaagtcgtttggcaggaatatatggaaacggtcgtgaagaatcgggacggctggaaagatatttaccgtgcttcaagggatatgatttaaaaagaaaggaagaaatggctattcatttactaggcatcaggcatcacggtcccggctcgtgccgcaatgtgctgaactacttgcaggaactgcaaccggatctgattctggtagaaggtccggcagaagccgaagcgctgctggcctgtgtggaaaatccgcagatgacgcctccggtagctttgctggcataccagccggacgagcctcagaatgcagtgttctacccttttgcggagttctcgcccgagtggcaggcgatgcgttatgccgtacagaaccggatacctttccgctttttcgacttgcctctgatctattcgctggctcttcggacagaaaagacctctgaacaggagacggaaacgaccgctgaagtcgcagaagccggcgacccgttcgactggctggctcatgccgcaggatttactgatggtgaatcctggtgggaaactatgattgaacaccggcaagaacctgccgatatttttcaggcggtacaagaggctgtgactgctcttcgggaagaacttccggggcacacctctccgcgtgacctgatacgtgaagcgtggatgcgtaaaatgatacgtgcggcacagaaggagaatttcgaacgcattgtcgtcgtctgtggtgcatggcatgtacccgcactggacgatatgcccaaagtaaaggatgataatgaactactgaagggacttcccaaagtaaaggtagaatgtacatggattccgtggacgtatgaccggcttgctttccgcagcgggtacggtgcgggaatcgaatctccgggctggtatcattatctctggcatcatccggaggatgatggcacgctttgggtgagccggatcgcctctctgttgcggcagaagaatatggatatctcggtagcccatgttattgaaaccgtccgtctggcacaggtgacggctgctttgagagatctgccttatccttctctgaatgaatataacgaagctgtcactacggtgatgggcttcggagatgatattttgttgcagattatcaaagaagaacttatcatcagcaaccgcttgggaagtgtacctgatgacgttcccaaagtacctctgctggtagacgtggagaaaatacagaaacgtctgcgtgttccgttcaccgccgagatcaaagaactgatattagacctccgcaagccgaatgatctggagcgaagtatcttcttccatcgcctgcaactgctgggcgtcgactggactatcctcggacggatagacgggaaaggtactttcaaggaaaaatggaccttgtatcacaaaccggaacaaatcatccaaatcattgaacgggctatctggggaaacacggtgatggaagctacgcagaaatatctgttgaaacagatggcggagattcagcatatcccggaactgacagctttgttgagtacggtcctccctgccgatcttccggtgctggtagaagcgatgaccgtacagttggaccgtctttcggctgcttctaccgatattctggaaatgatggaggcggtccccgatctggtgaatatcgtccgttacggaaacgtgcgtgatcttgatttctcgaaggtcggtgatatgctcgaagccatgattgcccgtattcttgcgggtggtgtattggtgtgtatcaatatcgatgaagaggctgccggtgatcttctgaataaattggttgccacggactatgcgctctccattctgaatcgggaagaactgaacctgatgtggcgcaatttcatcggtcaggtacgttcttctgccaatgtgcatccgttgttgtccggttatgctacccgtctgctgaatgacaaaggggaaatctccgcagaggagatggagacgacacttagtttttattcttctgttggcaatgctccggcagatatggcatactggttcgaaggctttttgcgttcatccggttcgatcctgttgctggacgaccgtctctggaatttggtgaataactgggtatgttcgcaggacaaagaaacatttatggaattgttgcctgtattgaggcgtactttcagcgaatttacctctgccgaacgccgtaagctgggtgagaaagcccgtcgtacggattctacgggcacatcatctgccgtaggagcttcggtaacggagaatgagtgtctgaatcgggaagaagcaaagaaggtaatccccgtgattcgtcaattattgggactggaaacaaagtaaaggaaagaagatggaagaagaattactgaaaaggtggcgtctgatactgggcggcgatgaggctgacggtacaggcgtgacattgaatctggaagaacagcggatagaccattctctggaagctgtatatgatagtgacagaagaggggggctgggttcctcggctcccaaagtaagccgatggcttggagatatccgtgagttctttccgcagacagtggtacaagtgattcagcgggatgctataaaacgtctgaatctgaccagtctgcttaccgaaaaagaaatgctggaaacggtcgtccccgatgttcatctggttgccaccctgatgtcgttaagccgggtgattcctgaaaagaataaggagatggcacgccaggtagtccgcaaggtggttgaggagttgcttcgcaaactgtcggctcctacgcaacaggcggtaaccggtgctttgaaccgttccagccgtcgcaggaacccgcgttacaatgagatagattggaaaacgaccattaccaagaacctgaaaaactaccaaccggactataagacgattattcccgaaatccgtattggttatgggcgtaaacggaaagcgatgaaagacattatcctgtgtctggatcaaagcggttctatggggacgtcggtcatttattccggcatattcggttctgtgttggcatccattccggcggtatctacccgtatggtggtttttgatacggcagtcgttgatctgacggatgatttgcaagatcccgtggatctgcttttcggggtacagctcgggggaggaaccgatatagcccgtgcgctgacttattgtcagggagtcattacccgtccgcaggacacggtgatggtgttggtgactgacctttacgaaggaggagactccagagaaatgagaaagaaatttgtctcgttggtcaatagcggtgtgcagttgattgttcttccggcgttgaacgatgacggtgctccgtcctacgacaaggggcatgctgagtttctcgcttccataggagtgccgacatttgcctgtactccggataagtttccggaccttatggcggctgctttgagtaaacaggacattggaatgtgggtttctcagaatgtaaagagtgaatgacaactattggatagaaaagaaagaaggctgtccctcatagcgaaggacagcctttcttagcttatataaatgtaaggggattgctaattacagagcacctacttctttcaaagcagcgtttgttccgtgaacagcttttgcgctggcagcgaacttagctttttcgtcagcgttcagatccagttcaacgatcttttcgataccgttcttgccaaggattacaggaacaccgatgcaaatgtctgattcaccgtattctccctccagatatactgaacaagggatcatcttcttttggtcgtgaaggatagattcaactacgaatgctcctgctgcacccggtgcataccatgcagaagtacccagcaacttagtcagagtagcaccacccaccatagtagcagcagccacttcgttcagtttttcttcagagatgaagttagttacaggcatacctttgtaagtagcgaagcgagtcaaaggaatcatagtagtatcaccgtgaccaccgataaccataccttctacttcgttggcgttgcagcccaaagcctgagacaagaaatatttgaaacgagagctgtccagtgcgccacccataccgatgatgcggttcttcggcaagcccagagctttcaatgacaggtaagtcattgtatccatcgggttagagataacaacaaggattgcattgggagaatatttcaagatgttttctgccactgatttaacgataccagcgtttacaccgatcagttcttcgcgagtcatacccggtttacgaggaatacctgaagtaattacaacaacgtcagagttagcagtctgagcatagtcgttagtgcagcctactacagttgtgtcgaaacccaacagttgagctgtctgcatcatatccattgctttaccttctgaaacgccttctttaacgtccagcattactacttcgtctgctacttcattgaaagcaagtacatttgcacatgtagcacctacgttacctgcgcctactacggttacttttgacataatactatatatttaaaaagttgataatttatttcatgctttttagcgcgacaaaattacaacgataatcctaattaaagaaatttttccgtaataattttcgttaaagaaaatgcccaagactatgttactctgttacgaaatgattacttttgtgcccgttatcgattaacaattggaactatgaacaaaaaaagccttcttattgcagctgtagctgttttggtgatagcgattatcggcatcacttatttgttgtttactgaaaagaaagccaatcgcgagctggtacaggaatttcagttggataaggaagatttggagaatgagtatagcagctttgtgcaaagatacgacgaattaaagtttaaagtatctaatgattcgttggcgcaattgttggatcaagaacaattgaaaactcagaggctgcttgaagaacttcgtacggtgaaaagttcgaatgcaacagagatccgtcgtctgaagaaggaattggcgtctctccgtaaaatattggtgagttacgtcagtcaaatagactcactggacagaatcaataagcgccagcaacaggtgattgcagacgttacgcagaaatacaacactgcttcacagcaaatcagtacactttccaaagaaaaggagaatctggataagaaggtgacactggctgcccagctcgatgtgaccaatatccgtatcgaaccgcgcaataaacgggggaaggttgcaaagaaagtgaaagacatcgtgaagctggctatcagctttacagtcgtgaagaatattacggcagagaatggcgaacgtaccatctatatacgtatcaccaaaccggataatgacgcactgaccaagagtgcatccaacactttctcttacgaaaaccgtacactgacttactccatcaaaaagtatatcgaatacaacggtgaggaacagaacgtgaatgtattctgggatgtggaagagtttttgtatgccggaaactatcgtttggatatcttcgagggcggaaatctgatcggctctcagaagtttacgctggactaaccgatataaattcaagaaaaaaatgcgccaataagcagtaaaaggctttttggcgcatttttctattagaaaaaggttaactttgtgaaaactaatagaataatacgtatgaaaaagcacttgactcagctactgctatcattactgtttctggtggtgacagccatgacttgcgatgaacaggatttggctgaaccgatagacatctcctgtactttgaaagaagtggagttatatcattgggataatgcaggtgagaaacctaaggaggctcttgataacaaagttctcaaagaggcttatatgatggagattcgtttgctgacagatgcgggggaaaaagatccggaatcttatgacgccgatcattatcttcgccatgtattatcggatggcatcaaaaagattcagatatttacggaaacagcttttaatgaagaatttcccgcaggagcagaagtcacttcctgcttttatgactatccaaagacgtttgttaaagatcagcagacagattatactgttaatggaggggttatatccatgatagatgaagtaaacaagatatataaggcgttattgaccattccccaatcaggcggagagttccgttttcgtgtagtgctgacaatggaaagcggtgaaacggttgaacggctgagcgatccggttactttctattaaatctgctgtctatgaagaaaatacatttattagccatgctattgtttactgcatgttttgtgcctgtatcgcaggcgcaggaaagcctgtttcttaaagatccatctaccaagaataagttgctacagttagacttggatgtgggaacctgttttgacctggcttatcgggggaagggaaatatgtacactgcaatgtcggaccggaaatctgtgtttcctgctatcaaccttcgtttgcaacatttcttttcgcgtaaatggggatggtatacgaatatccgtttggggattcccgtgaaatataggcgggattgttatactgaattagtccatgcagtcgaagcggattactatgtgaataatctcataccgggaacgcaaaaaacggacgttaatccctgtctggattttggtgttgcttatcgctttgaaaattcccattgggctttttatcctcgtttggggattggtgtgaatagcatttcctatcagcgtgtttgtgcggaactaaagaaaaaaggaggaaatgaattatataagatagagtatagaggggatgatgaaagtaactatggtagtgagagtatcgatgcttttattctttcggcaggtgttaccgccaactataagctcagtcgaaattgttttttactgttgaatgtcaattatatacagccattggggagatttacttatcgtaaatatgtaacagacctttatacgggagaaaaggtggagagaggagtctataaaagttctacattcgcccgtgatctgaatgtaagtgtcggattcggattccctttttatctgggaagaaagactaatagaaaatcaccgcatagagaaagaaccaggcagctaatggaacagaaacggaaaacatacgggttgtttccgggaaataagtagccatttaatcatttctttgcaatgatgagcgaatagaatttagcctttatacaaagtttgaaaaagaaaaaactctgccattcacaacaattggattaacattcttatgatatacttacgtgtcagctagtctctctataaaaataaaaactataaattgctgtcatctgtcactttgttgggtataatatcttgaatatgagtgattaatgaggtgacggcagtaggtgacggcagtgtgacggcaaattttgctgtcacactgccttgttttcaatggttccttatggtctgtttgtagttctatatagagctttttagtttctcccgtttgaaacttttgtttcttcagcttggaactaaagtttcatcggcttgaaactaaagtttcaaagccttgaaaccaaagtttcggacgcttgaaaacattggttccagcgtatggaaactagttatactagagtgtatgatgtcaaaagtcaatagtagcgagttcagtgtagtcgatgtgcgtgtgacggcaatagttgtcatcaccgtgccgtcacctgttgccgtcacagcgttaagccttgactatgagtgtgttatttgtgtttttgtgatgggtgacagcaataattggaaaaacaatacgtagagagaggagccggttgatacatctattataatgagatttgtcagattgataatcgtttaagagctttttaggtgccttaacgacaaaacaagtggctgattgtgttatattccctaagtaaccaaataaaaataacaagattatgaaacagaaaagagctaaaattggatttaccggatgtgccaaagcgtatatccggagtttgcaggaagaagggcgctattctacggcacatgtgtataagaatgcggttctttcatttacgagatttcatggcagtacgtatattgcattcgagcagatcactcgcgagtctttgcgacgttacggacaatacctgtacgattgcaaactgaaactcaatacgatctctacctatatgcgaatgctgcgctgtatttacaatcgtggtgtggaagctggtatcgcccgttttatcccccgattgtttcgtgatgtatatactggtgtggatgtccggcagaaaaaggcaatacccgtaaaggaactgcatacacttctttataaaacaccccagtctaagcacttgcggcgtactcaggagattgcccgactgatgttccagttctgcggaatgccttttgcggattttgcgcatttggaaaagtcggcattggcacaaggggtattgagatataaccgtatcaagacaggcacttctgtaagtcttgaggtgctggagtcatctctgcccacgatcagtaaacttcgcaataatgaccctgttcgggaagatggaacgaattatttattcagtattctgagagggaataaaagcccaaaaggtgaaagcatgtataaagaataccagtcggcgcttcgtcggttcaataatcagctgaaaagtctttcaagggaacttcacttaaagtcggctgtcacctcatataccatccgtcattcttgggcaacgaatgccaaataccagggtatacctattgaaatgatcagtgaatcattgggacacaaatctattaagacgactcaaatctacctgaaaggttttgaactggaaaagagaacagaagcaaatcggttgaattgtttttacgttgaaaactgcagtaattagaatagaatataatcagagtgttggctattagtgtgttatcatgtctattacttcttaggtaacggaaataaatacgacgcaaagatatataaaaagaatctcatatcccaaacttattatacattattttatttctctgacttaagaaaataaaataacactatgagaacacgaataccactgacttcatgttccgaacccttattgtttgtcatccgacaaaatctccttcataacccttttatacagtgcttctcgcaaaggccgctgcctttttcgcttcttttcccctatgtgtaaagtccggtaatggacttccgttacctaagaagtaatagataaatgtaagtagtaaattgtgacacgcaattcaaacaacaagctcattttgcatgccttctatttactttggttctgaatttatccattgggatatatgcttgtaaaggtacacacacagtgacaaaataaagagaatgaacattgcttcgatgtgggcaatgtcttaaaaagggtttttagtttacttatttaaaagtaaaagaagaaatggaaagtttatggaaagtctggttctccagaaggagaaaggtgtatgttcggatagcccgtcaatatggttccactccgtggcgggtgtattatttaggacatggaggcaggtgcaggtcgctcaaagacatgcagatattggaagcgttacagcggcagggagttatttcgcatatttacccttggtgataattgactgaaaaatacttgaacatatttaattatgtgtccgacagaaatatgaactattataaaatatggggtgagatgtttttctaaaaaggttactgtgaagtacccgaacggggataaaccctttatagcatgtgtatgtttcccacaacatgcttattgcttatataaacggagtctcttggatgcccgttttatataattgtttgtttttgtttaagtacattctgtcctggtgaggaaggatgtacttttttatgcccgaaggtccggaatctgatagtcgcgaaggtccggtcggaagattagcgccttccgtccgctccccacatcatcttgctgcggagggtatcgaagaaaatatgattgaaccgtttcactacttttatactgtagtctgcccggcgaatggtcagctgagtcgtctccttgcacgtttcgctgctgccgtcgatggcaacgaggaagttatggctgcggctttccacgtccagcgtgatttcccagtcgtcacgaatgacgataggacggacgttgaggctatgcggagctaccggagtaatggcgatcgtattggaatgaggaacgatgatcggaccgcctacgctcaatgaatacgcagtagagccggtaggagtggcgatcaccagtccgtctgcctgatacgtattcagataagcaccgttgatcgcagtgcggatgctgatcatggaagaactgtcccgcttgagcaccgcaatttcgttgagggcataaggcgattcctggagatttctgtcattgcagataagctgcaatacacttcgctcctccacactgtatctgcctgcctgaatctcttcgaaagtcacctccatctcttcgggtgaaacatcggcaagaaatcccagtcgccctgtgttgatgccgagaatggggatttgttttctacccacccggcgggcagctttcagaaatgtgccgtcacctccgatgctgataaccatatcggctgtgaagtcgttgccttcgagcagggcgtcgacaggcacttccatttttaaatctgccgtcaggaactggtaaaactcccggcacatacagatttccgctccctgcttcttgagaagctcgaacagtctgagtgcatgcaaagactttttaggctgatacgtatttccgaaaatggcaaatttcataagctgtttcattagtttcggttgcaaaattggcattttttcttggatttctactttaaataaccaaaaaagaactgagaatgcgtttcgtattattaggcaactaataataatatttgtatttttgcggcaaatattgcgtaaaactatgactaaattaagtgtaaacataaacaaggttgctacattgagaaatgcacgcggtggggatacccccaatgtggtgaaggtagcacttgattgtgaagctttcggggctgacggtattactgttcatcctcgtcccgacgaacgccacatccgccgggcagatgtatatgatctgcgtccgttgttgcggaccgaattcaatatcgaaggctacccgtcgccggagtttatagacctggtattgaaagtgaaacctcatcaggtgacgctggttcctgacgatccttcgcagattacttccaactctggttgggatacaaaagcaaatctggaatttctgtcggaagttctcgatcagttcaacagcgcgggcatccgtacttccgtctttgttgccgccgacccggagatggtggaatatgcggcaaaagcaggtgccgaccgtgtggaactttatacggaaccctatgctacggcatatccgaagaatccggaagcggctgttgccccatttgtggaagcagccaaaacagcccgcaagctgggcatcggcttgaacgccggacacgacttgagtcttgtgaatttaaactatttctataaaaacattccttgggtggacgaagtatccataggtcatgccttgatcagcgacgcattgtatctgggactggaacgtactattcaggaatataaaaactgtctacgctaatgaatgtattgatgttattggcccagggtgccatgaatatggccgactcgctggcaactgccaacccggtgctgactccggtcagcgctcccgagatgaatatgcttgatatggctatcaagggtggttggattatgattgtactgggtgtactgtctgtagtctgtttctacatcttatttgaacgtaactatatgatccgtaaagcgggaaaagaagacccgatgttcatggaacggatcaaggattatatccatagcggtgaaatcaaagcggctatccagtattgccgcacgatgaacactccttcggcacgcatgattgaaaaaggaatcagccgtttgggacgtcccatcaacgatgtgcaggtagccatcgagaatgtcggtaatctggaagttgccaaactggaaaaaggcctgaccgtcatggcaacaatctccggtggtgctccgatgctcggattcctcggtacggtgaccggtatggtacgcgcattctacgaaatggcgaatgcgggaagcggaaacatcgatataactttgctttccggcggtatctacgaagccatgatcaccaccgtaggcggtctgatcgtgggtatcattgccatgtttgcttacaactacctggtgatgctggtagaccgtgtagtaaacaaaatggaagctcgtacgatggaatttatggacctcttgaacgagcctgcccaaaagtaaccctgagacgttaatcactatcattaaccactaatcaataataaagtgggattaaaaagaagaaatagagtatcgcccaatttcagtatggcatccatgacggacgtcatcttcctgctgctgatattctttatgattacctctacggtggtgtcgcccaatgccataaaggtgttgttgccgcaaggcaaacagcagacttcggccaaaccgctgacaagagtcgtgatcgataaagacctgaacttctacgctgctttcggcaatgagaaggaaaagccgctgtcgttggacgaactgactccgttcctgaaaggttgtgcggagaaagaaccggagatgtatgtggcattgtatgcagatgagtcggtgccttaccgtgaaatcgtgcgggtgctgaacattgcgaatgagaatcattttaaaatggtgctggctacacgcccgccggaaaacaaataaagtaagtagttgctacttaactactaaaaaaaagaaacaattatggacgacagaagaaaaaagggtgaattcgtcggcgcgctgggtgcactgttggtacacgtggcagtgatagctcttttgattctggtgagctttacggttccccagccggatgaagacgcaggcggcgtacctgttgtgctgggaaatgtggagtctgcccgaggctttgacgacccttcgctggtggacgtggatatactgcccgaagaaccggaagcacctgcacctgcggaaacgcagccggaactgccctcggaacaggatctgctgacacagaccgaagaagaaacggtagtgctgaaaccgaaaacggaacctaaaaaggagaccgtgaaacccaaagaggtagtgaagcccaaagaaccggtgaagaaacccgaaaagacagaggcagagaaagctgccgaagcgaaacgtcttgccgaagaaaaagcggaacgtgaacggaaagccgccgaagaagctgcgaagaaaaaggttgccaacgctttcggaaagggagcgcagatgggaggcagcaaaggtacttccgccagcggcacgggaacagaaggcagcaaggacggcaattcatccaccggagcgaagaccggaaccggaggttacggaacatttgaccttggcggacgttctttaggtacgggcagtctgccaaagcctgcctataatgtgcccgaagaaggacgtgtggtagtcaatatcaccgtcaatccggcgggagtagtcattggaaccagtatcaatcctcaaacgaataccgtgaactccaccctgcggaaggcagcggaagacgcggcaaagaaggctcgcttcaacaccgtggaaggaccgaacaaccagactggaaccatcacttattattttaacctgagatagtatcactaatcaaaaatataggattatgggaactgtatatgctttttttgcagatggctttgaagaaatagaagcctttactgctgtcgacactttgagacgtgccggactgaatgtgcaaatcgtatctgtcactccggatgaaattgtaatgggcgctcacgatgtgtcattgctctgtgatataaactttgaaaactgcgatttttttgatgccgatctgctgttgttgcccggaggaatgccgggagcagctacgctcgataaacatgaagggctacgaaaactgcttcttgactttgctgccaaaggaaaaccgatcgcagcgatctgtgcggctccgatggtattgggcaaattaggtttgctgaaaggtcggaaagcaacttgctaccccagctttgaacaatatctggaaggtgcggaatgtgtcagtgaacccgtagttcgggacggaaatatcatcacaggtatgggaccgggcgctgctatggagtttgctctgaccatcgtagatctgttggtcggcaaagaaaaagtagacgaactggtagaagcgatgtgtgtaaaacgctaagctgtctatgaaacaatctgtgattattgtcgccggtggaaagggcttgcgaatgggaagcgatcttcccaaacaatttcttcctgtcggtggcaaacctgtgctgatgcgtacgctggaagcattccgcaagtacgatgcgatgcttcagattattctggtacttccccgtgaacagcaggacttctggaaacagctttgcgaagaacatcatttttcggtggaacatcttgtggcagatggcggcgagacccgttttcattcggtgaagaacgggctggcgcttgtggaggctcccggtctggtaggagtgcacgacggagttcgcccgtttgtatcccttgaagtgattcgccggtgttacaagctggcggaacagcataaagctgtgattccggtggtggatgtagtcgaaacgctgcgccatttgacggatgccggaagcgaaacggtgagccgtactgaatataagttagtgcagactcctcaggtctttgaggtggagttgctgaaacaggcttatggacaggagtttactccgttctttacggacgatgcttcggtggtcgaagcaatgggcgtacccgtacatctggcagaaggtaatcgtgaaaacataaaaataacaactccctttgacctgaagatcgggagtgctctcttgtaaatgttcgatttaaccacacgcgacatcaaatttatctccggtgtagggcctcagaaggccgcagtattgaacaaggagttggaaatctactcgttgtacgatctgatttattattttccttataaatatgttgaccggagccgcatctattacattcacgaaatagatggcaatatgccgtatatccagctgaaaggggaaattctcggcttcgagacgataggcgaagggcggcaacggcggctgacggcccatttctccgacggtacgggaatcgtcgacctggtgtggtttcaaggtatcaaatatatattaggtaagtataaacttcacgaagaatacatcatcttcggtaagcctaccgtgtttaacgggcgtatcaatgtggcacatcccgacatcgacaagccggatgatctgaaactttcttccgtcggactgcaaccttattataatacgacggagaaaatgaaacgaagttttctcaattcgcatgcgattgagaagatgatggctacggtgatccagcagatacaggaaccgctgccggaaacgctttctcccaaaatcctgtcggaccatcatctgatgcctctgacggaggcactccggaatatccatttcccgacgaatcccgattcgctgcgcagggctcagtatcgtcttaaattcgaagaactgttctacgtgcagctgaatatcctccgctatgcgaaagaccgccaaagacgatatcgtggatatatctttgaacgggtaggggatgttttcaatactttctattcgcagaaccttccttttcagttgacgggtgcacagaaacgggtactgaaagaaataaggaatgatgtgggaagcgggcggcagatgaaccgtctgcttcaaggggacgtgggtagcggtaaaaccctggtagcgttgatgagcatgctgcttgcactggacaacggtttccaagcgtgcatgatggctcccaccgaaattttggcgaaccagcattacgagacaatcaaggaactgcttttcggtatggatatccgtgtcgaactgctgaccggatctatcaaaggaaagaagagggaagcgatcctgaccggactgctgacgggagatgtgaaaatcctgataggtacgcacgcagtcattgaagacacggtgaacttctcttctttgggactggtcgttattgacgaacaacaccgcttcggagtggcgcagcgtgcccgcctctggacgaaaaacatacagccgccccatgtgctggtgatgaccgccacgcctattccgcgtacactggcgatgacgttgtatggcgatctggatgtttctgtcattgacgagctgccgccgggacggaagccgataaccaccattcatcagtttgacaaccgtcgggaaagtatgtatcgtgccgtacgcaagcagatagaagaaggacggcaggtatacatcgtctatcctttaataaaggaaagcgagaagatcgacctcaagaacctggaagaaggttaccagcatatcctggaagagtttcccggctgtaccgttgccaaagttcacggcaagatgaagtctgcggagaaagatgagcagatgcagctctttatttccggacaagctcagattatggttgccactaccgtgatcgaagtcggggtgaatgtccccaatgcttctgtgatgatcattgagaatgccgaacgcttcggactttcacaactccatcagttgcgcggtcgggtgggacgtggcgccgaacagtcttattgtatccttgtgacgaactacaaactgaccgaagacacgcggaaacggctggaaataatggtgcgcaccaatgacgggtttgaaatagcggaagcagacttgaaactgcgcggccccggtgatttggaggggacgcagcaaagcggcattgccttcgatctgaagattgcgaaccttgcccgtgacggtcagttgttgcagtacgtccgttcgatagccgaagatatcgtagataacgacccgtcggctcaaagtccggagaacgagatcttgtggcggcaactgaaatctctccggaaaacgaatgttaactgggcggctataagttgaaaaacggttaaacatgcagtttatttgcgggaatgtgttgcaaaacatgtttcgtttctattcctcctatttatagggctttaacgccgctttttctgttcttttcatctccgtacttctgaaaaatagttaatgacttacttgccctttcatcggaaaatactatctttgggggaattttttatagtaaatgtatagtttaatcttttgaaagtcacacatcatgatcgaaaaaacgctggttattttgaagccgtgtacccttcaacggggattggttggtgagatcactcatctctttgaacgtaaaggactacggttggccggcatgaaaatgatgcaactgacggatgaattattaagcgaacattatgcccacctgagcagcaagcctttctttcagcgcgtgaaagattcgatgatggcaactcctgtcattgtttgttgttatgaaggtgtggatgctattcaagcagtccgtacgttggcgggaccaactaatggacgtctggctgcgccgggaaccattcgtggggattatagtatgagttttcaagaaaacatcgttcatacttccgattctccggaaactgcggctatcgaattaacgagattttttaaacctgaagagatattcgactacaaacaggcgacttttgactacctgtatgcgaacgacgaatattaattgaattgacaagaacgaatgaatttcaattgcattattaaaacaggattggtagctgtagcagctatggtcagcctgagctctttctctcaagacctgattgcccgccaagctccgatagacaagaaattaaaaaccgtagactctttggcacttcagaaacagatccgtgccgaacagtcggaatatcccgccttaagtctttatccaaactggaacaaccagtatgcacatgcttacggcaatgctatcatccccgacacttataccatcgacctcacaggcttctgtatgccgactccgagtacgaagattacttcgcctttcggtccccgctggagaagaatgcacaatggtctggacctgaaggtgaacatcggtgacacgattgtagctgcctttgacggtaaagtacgtatcgtgaagtatgaacgcagaggatatggtaaatatgtagtgattcgtcatgacaatggattggaaaccatatacggacacttgtccaaacaactcgttgaagaaaatcaattggtaaaagccggcgaagtgatcggtctgggtggtaacaccggacgttctaccggttctcatctccactttgaaacccgcttcttgggaatcgccatcaacccgatttatatgttcgacttcccgaaacaggatatcgtagccgatacttatactttccgcaagacgaaaggtgtgcgtagtgccggttctcacgacactcaggtagccgacggaacgatccgttatcataaagtgaagagcggagatacattgtcacgtatcgctaaagtgcgtggagtatcggtcagcacgctttgtaagctgaaccgtatcaagccgacgaccaccttgcgtatcggacaagttttacgttgttcgtaaagatgtaatacaataatagctttggaagagggcactttaatataatttagagtgccctctttctgtttttacttaattattgttacctttgcgcactatttggaagaagatgaaagataccaagcaacaatttgaacatgtcatcgccttgtgccgtgacttattctccaagaagctgcacgattacgggcctgcatggcgtatcctgcgtccggcttcggttactgaccagatttttatcaaagctaacaggattcgtagtatcgaaaccaaaggggtgactctagttgacgaaggaatccgttcggaatttattgcgatagtcaattatggcattatcggtctgatccagctggaactgggctatgccgaatctgccgacatcagcaatgaggaggctttggctttatatgacaagcatgcaaaggaagcgctggaactgatgcttgccaaaaatcatgactatgatgaggcttggcgcagtatgcgtgtgagttcctacacagacttgattctgatgaagatataccgtaccaagcagattgaaagtctggcagggaacacgttggtgtcggaaggtatcgacgctaactatatggatatgattaattattcagtattcggattgatcaagatagaatttgaaggataagaacttacatatcatccagaagacaggagcgaatgtctgccgtttccttttagcggcatcgttcatcttttccggttttgtgaaggctgtcgacccgctgggcttccagtataagatacaggactatctgaccgccttcggggtgatttcatggtttccttctttcttcccgttgttgggaggcattatattatccgccatcgaattttcaatcggtatcttcctgttcttcggtatcaagaaaacaatctccaccacattggcgttggtgctgatgatcttcatgacaccgctgacgctgtatctggcgattttcgatccggtgtcggactgcggctgtttcggcgatgcctgggtattgactaactgggagacatttgcaaagaacatcgtactgctgcttgccgcgattgctacattccagtggaggaaaatgctgatcagattcgtgacccgaaagatggaatggctgatttctctgtacacgatattctttgtatttacactgtcgttttactgtctggaccgtctgcctgtgctggacttccgtccttacaagatcggacagaatatcatgaaaggcatgagtattcccgaaggagcgaaaccgagtgtatatgagagtgtctttatcttggaaaagaacggggaaaagaaagagtttacactggacaattatccggacagcacatggatctttgtcgatacgcgtactattctgaaagaaaaaggatacgaaccttcgattcacgacttctccatgatggatctgagcacgggtgatgatatcacggaagacgtgctgacggatatgggatataccttcctgctggtggcacatcgtatcgaagaggcggacgacagtaacattgatttgattaatgagatatatgactactcggtagagcatggttacagattctactgcctcacttcctcaccggaagagcagatagaattgtggaaggacaagaccggtgcggaatatcctttctgccagatggacgacattacgctgaagacgatgattcgctccaatccgggactgatgctgataaagaacggtacgattctgaacaaatggagtgatgaagacattccggatgaatatgtactgactgacaaactggagaatctggaactaggtcagcagaaggttcggagtgacgtacatacgattggatacgtattcttgtggtttgtcattccgctattgctggtgttgggagtggacattctgattgtccgccgacgcgaacgaaagaacgaaaagcggaagcagcaacaggaagtaaaagaacaataaatttattaaccctttaaataaagaacaaaatgagaaagaacattgttgcaggaaactggaaaatgaacaaaacccttcaagagggtatcgctttggcaaaagaactgaacgaagcattggctaacgaaaagcctaactgtgatgtaatcatctgtactccgtttatccacttggcatctgttactccgttggtagacgctgctaagattggtgtaggtgctgaaaactgtgcagacaaggcatccggtgcatatacaggtgaagtttctgctgaaatggtagcttctacaggtgcaaaatatgtaatcctgggtcactcagaacgtcgtgcttactacggtgaaactgttgctatcctcgaagaaaaagtaaaattggctctggctaacggtctgactccgatcttctgtatcggtgaagtgctggaagaacgcgaagctaacaagcagaacgaagtagtagctgctcagatggaatctgtattctctctgtctgctgaagacttctctaagatcatccttgcttacgaaccggtttgggctatcggtacaggtaaaacagcttctcccgagcaagctcaggaaatccacgctttcatccgttcaatcgtagctgacaagtatggcaaggaaatcgctgacaacacttctatcctttacggtggtagctgcaagccttctaacgctaaagaactgttctctaaccccgacgtagacggtggactgattggtggtgctgctctgaaagtttctgacttcaagggtattatcgatgcgttcaatgcataattagaatatctttcgggaactgactaaaaagtagatagtaactctaaactctcctccttcaggaaggaggggaattgcagatagtatcgactttttagccacttcctgaaattaaacttttatcgaatgagaaaactaggtttacttttatggatgctggcttttaccgctgttggtgcacaggcgcagaacatcatcaagagtctggaacgtacagtgccgggacagggaaaggtgacgattcatcaagaccctaagatagaggcattgataggcgtggaacgtccttctatgggcgaacagaaagtgttgaaagcagccggattcagaatacaggcgtatgccggtaataatacccgtgaggcaaagaatgatgcttatcgtgtagcttcccgcatcaaagagtatttccccgaactgacgatttacacttcgttcaatcctccccgctggctttgtcgtgtgggtgatttccggagcattgaagaggcggacgcgatgatgcgtaaactcaaggcaaccggtgtattcaaagaggtctctatcgtcaaagaccagatcaatattcctttataattgtatcatgttagaaaaagaagaaattgtctctccgaatctggaggagttgaaaagtcattatcacagtattattactttgttgggtgaagatgccggaagggaaggtttgctgaagacccccgaacgtgttgcgaaggctatgctgagtctgacaaaaggttatcacatggaccctcatgaagtgttgcgttcggctaagtttcaggaagaatacagtcagatggtgatagtgaaagacattgatttcttctctctctgcgaacaccatatgttgccgttctacggaaaagcacatgtggcatatatccctaacggctatatcacgggattgagcaagattgcccgggtagtcgatatcttttcccatcgcctgcaagtgcaggaacgcatgacgctgcaaatcaaagattgtatccaggagacactgaacccattgggagtgatggtggtagtggaggcaaagcatatgtgtatgcagatgcgcggcgtagaaaaacaaaattctattactactacttcagactttacaggagctttcaatcaagccaagactcgcgaagagtttatgaatctgattcagcacggcagggtgtaatacgctttacaaaatgtggacgatgtagttccccgtcaatgaggattgcctccggtaccgatgaaggggtgtctcggcaccgatgagaaatttagcgtaatacaacgcggtcgcccaggcgcttcgccatcagactttgcacttcccgcatctcattgtaacgctgcatcagcgaattacatttctcattgtcatgagcgagtgccggatcttgcagggcataaagcatatgtttcagttcttccgtgacaatcgcatacttgaagttgatcatcaacatagggacgagttcgtacagccgttcttcatctgtcacgatcttctgtgatttcgagtgatatttacttagctgataacgtacattgatcaagtccacgctcaaccggctgatggtctggtcgggatgtgccaggaaatagcgttccgcgataaaaccggcatcgtgtatatgcgtggcggcttctgtcagaatctgtcggtgcaacggattatggaaagccaggtcgtcttccttcagatcattcaccacatattcgataacggttaccggaatttcatttccttcttcgtcggtaaggttgcacatcactttttcaccataacggactactgcctgcaggatcaatcgctcaaacttatagaactcctgaccttcttttccttcctgcggaataaaggaggtataagaatctccgggaacagtggtatccgtagtggaggcaggtgcattgccgggaggaaatcctgctgcacctcctgtagcagcggacatcggatctgcgaaagatacgatattgccatcgtcatcatattcgggttccggtggcattcctgcattggcgtagggacttgatggagtagaataagtcggagcaccggaataagccggtgtgccggaagcggcagctgtaccggaagtatctccggttgttgaagatgaatgattatagctgggacgattggctttttcagcctgcgcctctcttaatttggcgacttccgctaccagcagtttttcttcgatgcgcagatgttggctgcattctttgatgtagacatcccgtataatggcttccggtatgacggaaatgcttcgtacgatattcgaaatcagttccgcgcgtttgatcggatctcttcccgcgtcttccatcagaaggtcggtcttgaagcggatgaaatctttctcgtgctcacggatgaatgcctggaattcttccgaattatgtttgcgggcgaaggagtccgggtcgtctccgtccggaagcaggcatactttgatgttcatgccttcttccagcagcatatcgattccgcggatagaggctttgataccggctacgtcaccgtcatagagtacggtaatgttattggtgaaacggtggatcagacgaatctgtcccggcgtcaatgcggtgcccgatgaagcgactacgttttctatgcccgactggtgcatggagataacgtccgtgtatccttccacaaggaaacatctgtcctgcctgacaatcgcctgtttggcaaaatagattccgtatagctcgttactcttgtggtaaatttccgactcgggagagttgacatatttcacctttacccctttggtggcggtgctgagcacacgtccgccgaaggcgaccacctttccggaaagggtatggacggggaaaatcacacgtccccagaagcggtcacgaagacggtggtcatccgtttcgtagcagattcccgttttcaccaggaattctttcttgtagcctttgcgcaatgcttcttgtgacatggcatcatggctttccgtacagtaacccaactggaatttctcaatgatgtcatcacgaaatccacgctgacggaaataagccagaccgatgctgcgcccgtccacatgattctttaagatattctgaaagtaatcgcgggcgaagttgttgacaatgaacatactttcgcgcgttgtctgcgcctgtttctcttcattggtcagctcccgttctttgatttcgatgttgtatttcttggcgagatatttcagtgcctcgtaatacgacatctgttcgtgctccatgatgaagtggaccgagtttccgcccttaccgcagctgaaacacttgcaaagtcctttggcaggggagacgctgaatgacggagtcttttcgttgtggaacgggcacagacctacatagttcactccgcgtttgcgcagggtgacaaactcagacactacatctacaatctgtgcggcatctaaaattcggtctatggtaacttgatctatcattcttcttttctcctgtgattccgtttttgcggatacaaaggtacatataaaaaaatcccctgcaaagaactttcttgcaggggatggttaaatcttatcgaaggagaggatgatttacttgatcttttcccgaatcttggtgaggtaggctttcataccttccgcatctttcttttcgatgatttcgagaagattcttcagctctgtacggatattggccacttgtcccggggtgcgtgggttgaacaggatttcctgcagcaggtagtcatcttcgctcagcagcccctttgcgatagccatgtgcttcttgaaagttgttcccggagcttcctgatgcttcatcacggcagcaaatacgaaagtcgaaacgaatgggatggagagcgagtatgccaccgtttcatcatgttcgtcgaacgtatattcgaagatgttcaggcgcagcgtctggtaaaggtctttgaagaaaatctttcccaaatgatctccttcgctgatgataatcgcattctcgctgctcagattgctgagactggcaaacgtcggtccgaacatagggtgactggaaacgtagcggaatccgctttcttcgtagaacttcttcagtcctgtctttacggaagcgatgtcactgatgatacagtctttgggcagcacaggcaataccttgcggaaagcatccagcgtgtattttacggtgacggcattgatgaccagttcgggttcgaattctttgatttcctccagtgtggtgaaacgatacgtgttatacacgaaacgcaactggtgcgggttgacgtcaaacacggccgtctcgtgctgaaaactcagtatatccgtaaagaaggaacccattttaccggctccgaggattaatattctcatatctattattattggggagtttctcaaaagtcaatagtatctctaaaagttaatagtatctcacattggggtgactaacaagtcgattctatctttattctcctccttccagaaggaggagagttaagatactaccgactttctagtcggtctcagttgtgttactgctgacttatttgttagtttccatttgatttttgagttcttttgggctttttatttattaataatctctatctgctggcggacagactcttcgtggattgcttcgaagatcagcttcataaagtctgcgctcataccgcattgttctccttgcgcaccgcgcttttccaggatttcattgtagcgtcctgcttgaagaacggtgattccgtgttcttttttgtaagtaccgatctcacgtgctacgcgcattcttttagccagttcctggatgatgttatcgtcgcattcgtcgatttgcttacgcagttggctcaggctttctgtcgtctgggtttcggtacggatcaccaataagttgaggatgtagtcgagtacatcgggcgttacctgttgagaagcgtcgctccacgcacagtccggattgcagtgactttccacgatcagaccatcgaagttcaggtccattgcctgctggcagagcggggcaaccagttcgcgttttcctccgatgtgacttgggtcacagaaaatcggcaggttaggcagacggcgacgcagttcgataggaatgtgccattgcggaaggttgcggtatatttttttgtcgtagctgctgaaaccacggtggatagctcccaaacgcttcaagcctgcgttgtggatacgttccagtgcaccgatccacaattccaggtctgggtttaccggattttttaccagcacggggatgtcgacccctttcaatgcgtcggcaatttcctgtacggcgaaaggattggctgtggtacgtgcgcctacccaaaggatgtcgattcctgctttcagacattcgtaaacgtgtttggcagtcgctacttcggtagaaacatacatacctgtttctttcttcacttccttcagccaggcaagtccttccacaccgattccttcgaaacctcccggtttggtacgcggtttccagataccggcacggtatatcttttgtcctttggctgccagttgtttggcggtttccattacttgttcttcagtctctgcgctacacgggccggcgataacaatcggtcttttggcttcgatgcccggtaataaaattgattcgagttccatattcttattgtttttattttattcttgttcttactctttcgggcaggcgtttcctggtctgccgctgatttacttttatcggtcttttctttttaagaaagcttcttgattctttccaatgcttccgccagtttggcatccttgcaacaaagggaaatacggataaaccttgctccgttgctgccaaagatgaatcccggcgtgataaatacccttgcctggtgcaatactttttcggtcagttcttctacatccttgcacgaagcgggaatctttccccaaaggaacatacccacctggttttcgtcgtaggtacaccccagtgttttcatgatttcgccggccagatggcgacggccgcgatagttgtggttgttaccttcgtaccagtccgcttcggcttccagagctgtggcggctgccagttgcatggcacggaacataccgctgtcgatattgctttttactttcagtatccattgtacgaattcggcattcgaagccagcattccgatacgccatcccggcatattgtggctcttgctcatggagttgaattcgatgcagcactctttggctcccggtacgctgagaatactgatcggcttttcgttcaggataaagctgtacgggttgtcattcacgatgacgatattcttgcggcgtgcgaagtctaccagacgttcgtagagttccggagtggcgttggctcctgtcggcatattcggatagttggtccacattagtttcacgcggctcaggtccatcttttccaatgtttcgaaatcgggcatccagccgtcttcttctttcaggtcgtagctgattacttccgcaccgagtattttactcagagaagtataggtggggtatcccggattcggcaccagtacctgttcgcccggattgacaaaagccagtgtgacgtgaagaataccttctttggaaccgatcagcggctgtatttccgtattcggattcagttccactccataccagcgttgataccaggctgcgaaacctttacggagttccggtatgcccacatacggttggtaaccgtgtccgttgggatcgtgagcattgttgcacaatgtttcgatggtaacctttgaaggaggcatatcgggacttccgatacccagactgataacgtcttttccttctgcattcatttgtgctacctctttcagcttctttgagaagtagtattcgctgacacttgccagtctttcggcaggagcgattttatacgtttgactttccttctgcatattcgcctaatattttaagttctttggttaatggagtaattgctgctatagattgtttatatctcagataatcattgaaagatacatcgacgtaaaactggtattcccattcccgtccgatgatcggcagcgattgtatctttgtcagattgatgttgtagaacgaaagaatggataatacttgcgacaggcttccttctgtgtgtggcaatgtgaataccatgcttgccttgttggtcgcctttgcgtgatgctggcggagttcgtccacttgccacggatcggcaactaccagaaaacgggtgaagttgtgcttgttggtttcgatgccttcttggagcactttcattccgtagcgttctgccgccgttttcgagcaaatggctgcatgccctttcaggttttctttcttgatgatttccgcgctgcgtgccgtatcttctccttccactactttgagttgcggatgctgattcagaaaatcacggcattgcatcagggcgatagggtgggagttgacttctgtcaggtcttcccagctttcttcgggcaggcagacgaagctatgtgagatgcgcagcttgtattcgccgataatctgcgtaccgctttgtctcaacagttcattgttgtgcagcaggcttcccgctatcgtattttcgatggctagcattccgatgacctggctgtctttccgtatcgaagtaaacacgtcttcgaagttggcacaacagattaactctatttcttctccctcgaagtacttgtgtgcggcgatatcgtgatatgagccgagtgttccttgaattgctatctttttcattgttctaatagggttatataaaaaaatcccgcgtccatatggaagcgggatttatatgattaatttcttcatctcagtccttaagcatcatgtcacttgatacatacaaactcccgctctactttctggctaaagtaaaagtaaaaaaagaagtaatatgcataagaaaatgatttcatacgaatctttgtttctgctttggtttctaattctggggcaaaagtaataattttctgttagatgcaaacaaaaagcgatactttttttgttttcttctctaaaaaagatgaaaaggtcacctgatatgacagtaatgtttcagttaaaaatgagtatataccgccgtctgcctagaagattcccgggagtgcttccggtttcggtcccaggttcttgaattctccgttcagactagcttcgtcttttggattcagctccagtgacttcttcatgtcttctacggaaccgtctttatcaccgttcagtagtttggcgcgtccgcgttctttataggcttcggcgaagttcgggttcaactcgatggcttcgtcaaacagggcgattgcttccgccagtttcttctgattgatataaagctgtcccagatagagataggcttgttcgttgaatgggtttatttccgttacaaacttgtagtccgtttccgcttcttcttcctgtccgttggcttctttcaccttgccacgcagcaggatggcggtctcttcttccggattctgggcgagtacggcgtctatgtcttccattgtttccttgtattgcttcattttcagcagagcttccgcacgcatcagacgggcttcgatgaagtcgtctttcagagtgatggctttcgtcagatgagcgatggtcatgatttcgtcatcctgtcctttgcgggcttttccgagcaggaagtgtgcgactgcatttccttcttcgatggcgattgctttgccggcagcctcttccattgctttgtaatcttcctggatgtagcagacattggccagtgtgaggaatgtgctggtcacatgaggttccattactgccattttctccagaagttcgcgggctttttcggtttctcccatcgggatgtaaagttggctgagatagcccatcgtttcgaaatcctcttcgatggcaagcgcctcggtaaagcactttatggcataatccggacgtcccatgcgttgtgcacgcaagccgtcatatttgaatatctcgaagtttttctgatcgtttttctgtttttcactctccggagtttcggacttaccggagaaaaaagacttaaaaaagttcggcatgatagtgttgttttagagtttatctgcaaatgtaataacttattttgaaatatgtagcattccgtcctgcatcttcagctcgccttcgtccaataaatatcggattacttgtccgatatcctctttttccgcctttatctgatcggctgtttcggcaggagtgagagggctgtggctgagtaagttgagtatttgccttttcacttcttcgtaagatttctcggataagttgtcggtggcacgcttgctgaggcagacatcgcattgcccgcagttgtgttcgtttttctctccgaagtagcggagaagcatccggctccggcatatgttttcggtggtgacgtattcttccattgccttgatgcgtgcttcatagcgtgctttgcgctcttcgtagacgctgggggggatatgcaggaaacgtaattccagtcgttcgcgcgtatatataatataaggtgtctttttgcggggaatgtagtccacgatgcggcgtttggttaacgtcaccaatatattatagatttgctggcgtgtcagtccggtgcggatggcaagagactcttcgctgatgtaggcataatcggtgaaaactcctgtgtatgagcgaagaatactctgtatcagagcttccgcctcctttcccatctcccgcaacttgtatagttcgtcccgacggatggtaaagagaatccgtgatgaattatcctgttcgtccgtgtattccagatagcctgcctgagtcagtattttcaaggcactgtctaccggcaccggaaagtatttgaacttccggcagaactcttccagattgaattcgcggatacattgaaaaccgtcgcccatcgccatttggtaatagtactggagatgttcgtagacattcagaatgtactccttgtcggggaaggtgtcgaccactcgtttatggagtgttgtcttgtccgatttggagtacaggatgacggcataggctttctctccgtctcttccggcacgtccggcttcctgaaagtaggcttcgggagaatcgggcaggtcgagatgcagcacgatgcggacatccggcttgtcgatacccatgccgaaggcattggttgccaccatgacgcggacttctccgctttgccagcgtttctgccggaggtctttgacggcattgtccagccctgcatgatagaagtcggcggttataccttcgttcatcagcagttcggtgatttctttggtgcggcgtctgttgcggacatagatgatggcactgcccgatattcgttgcaggatatacgggatttctttcgttttattgtcggttttgcgcacgatatatgccagattcttccgttcaaagctcatgcggaagacatttccttcccggaatttcagacgggcctgaatatctgttacgacttccggagtggccgtagctgtcagtgccagtaccggaacttccggcaatagttcccgtatctctgcaattttcagatatgccgggcggaagtcgtatccccattgtgagatacagtggctttcgtctaccgtaatcatggagactttcatcgaacgcaacttggtgcggaatatttccgtatccagccgttccggagaaatataaaggaatttgtaattgccgaagatgcagttttcgagtgcggtaagtatttcctgccgcgtcatgcccgaatagatggcaagagctttgatttcccgcttccgcagattctgcacctgatctttcatcagggcgataagcggggtgatgacgatacaaatgccctcctgggcgagagcgggcacttgaaatgtaatagacttaccgcctccggtaggcatcagtcccagtgtgtctttgccttcgccgatactggtgatgatctcctcctgcaagtcgcggaaggagtcataaccccagtattgttttaatatctcctgatacttattcaatcggctttatatcctcgatttgaagttggacttcgccacgcttgtgcgtgttctcctcgatcgtatagcagatgtcgaatgaacgcttcgtcttgatatagcgcacatgagaactctgtccgaatgcgatgccgttcatgacattattcgacttgttgtcaacgagttccagcttgatatgttcctgatcgcgtcctactactttgctggttccgtagtcatagacgtgatgcgtacagaagatcggtttgatattgtccggaccgaaaggattgaatttcttcaggtcattgaagaatttcgatgtgatgtctctgaagtcgatctccgcatctatattgatgacggcgctggtttgttccggcagaatatgttgtgacacatattcttcaaatcgtcgggtaaaggcttccacattctccactttcatggataaccccgctgcataggtatgtccgccgaagttctccaacaggtcgcggcaatgttcaatcgctttgtacacatcaaatccggagacggaacgtgcggaaccggtggccatatcatccgtccgtgtgagtactactgccgggcggtagtaaacttctgtcagacgggatgctacgatgccgatgacacctttgtgccattcctcattataaagcacgatggaacggcgttcggatagcccttccagattggccacaatattgttagcttcttctgtcatgctcttgtcgaggtctttccgggtttcgttgtactgattgatctgtcccgctttctccagtgcggcagaaaagtccttctctgtgaggaggtccaccgcttccttaccgttctggatgcgtcccgatgcgttgatacgtggtccgattttgaacacgatatcgctgacggtgatctccttttcggagagtccgcatacatcgatgatggctttcatgccgacgctggggttgctgttcagttgcttcagaccgtgataggcgagaatacggttttcgcccatgatcgggacgatgtccgacgcaatgctcaccgctacgaggtcgagcaatggaatcagatgatgaaattcaataccattgttgatagcaaatgcctgcataaacttaaaaccgactccgcaaccggaaaggtgggtgtatggataagtgttgtccaggcgtttggcattcaggattgcgacggcaggggggaggatatcgtccggcacatgatggtcgcagatgataaagtcgattcccttttctttcgcatacgttatttcctccactgctttgattccgcagtcgagtacgatgatcaatcctacgccggtctctgaggcatagtcaactccttttttagaaatgccatacccttcgttgtagcggtcgggtatgtaatagtcaatgttcgaatagaactgttgaataaacttgtagaccagtgctacggcagtagtaccgtctacatcataatctccataaatcagaatacgctctttttttcccatcgccttgttcagacgttctactgcaatgtccatgtccttcatcaggaacggatcgtgcaggtcgggcaattgcgggcggaaaaacttcttggcatctgctgccttcgttattccccgctgcaccaaaagttgtccaagtatcgggctaatgcctaattcctgggccaatgtctggcttgtctctgcctgttcgggtgtaatgggttgataattccatttgtgattcattttatatattgttttttctttttctgttctcaggggtcagaaaggcgctactttccaacaaggggtaaaagtacgaaaaaaagcggaagggtatagtagatatgacgaaaatatttcaaaacctgtggaattagctccttacgggcttggtattcaaatggagcaaatgcatacagatttgaatcaaccgctgattcgcattaatagctaataaagcgaaaatgaaaattaagtccgaagattattctcctcataacatcataaggtattcagttatatgacacaaaaagagaagggtagtattgtagcaataattcatcgatttacctagaaaataaagaacttttcaaaatcagcaccaacatctatacgaaagactttgactaattatgcagtaacctccaatcatttattaataaattctttcatcgtttattataaacgtcctccaagtttattataaactcggaggacgttattcctgcaataaatatcaatattaagcaacaaaaaaggctacaattcccataaagaatcgcagcccttagcttgtatcagactatccaacaagcattacccggagtgggaatgcctgtaatctgttattatataatacttattattgctcatatttcgtctatattatcaatgttatcgaatttacttccggttttcacttacaaagatacaacattaaaagcggtttgtcaagtcctccatgcttctttcatacatctgattacaaatcacatataaatgaattaatttatatctgaatatattagttatatgacgggagaagtatatctttgtgtgattagttgctacacgaaatatgaatccaaaacttacagactgtttatgagaagaaatcttgttggtatcattgttctaatcttgttgtccgttagggtcgtaaatgcacagactgttgctgactctatagcaatagtgacagctccttgggaagtggtgaccgtagaaaatggaattgtacataagcgggcttccatcccttttctttatcaaggcgctcagtccattaatatattggagataaatccgaggactggcaaaaagatcggcattgcctttaccggacaattggagaaaataagccggattgcccggaaacatcaggccatcggagccatcaacggctcctattttgatatgacgaaaggaaactccgtctgttttctgaaggtgggaagtcaggttgtggacactacttcgttggatgaattgaagttgcgggtgacaggagcggtttatgagaagaaaggaaaagtgaagctcattccttgggacaggcagatcgagaagaactacaagaaaaataaaggttctgtgttagcttctggcccgttgatgctgaaagacggggaatactatgactggagtcagtgcaatgccaattttatagaaaccaaacatccgcgtagtgctatttgtctgactgaagaaggaaagattctgtttgttactgtcgatgggcgatctccggaaaatgctgtcggaatcaacattccggaactggcacatctgcttcatgtattgggtggaaaagatgcgctgaatctggatggaggaggttctaccgccttatggctgtccggtgcaccggaagagggaattgtgaactttccctgtgataacagaaactatgatcatcaaggagagcgtaaagtggcaaacttcctttatgttcattaagagagtattcacatggttgctgttcacttttggagagaggaattatatataatataatgtataagcaagtaatttctattatatagcggacatgattcagtataaaacttttcttatcgctcaggttttggctctccgaagtcaggcaccgatgaggaatggtcccgacaccggggaaggcttatttctttcagtttttcttcttgcgtacgtccttcccttcgaatttgcagattgcctctatccagtcttcggttagcggcatcgactcatgtttttccaggtcgaaagttaccatgatcgatttgcagatacatttcacctcttgggtttccgtgtcgatcacccgttgaatgagatgaaagcttttggttccaatttcagaaacggcggtttgtacggcaatatgatcggatgcgaaaatctgctttacaaaattggcttcgatatgaacgaccactatgccgatcttttcccagtccactcccggacatacggaggcgaaatattcagtcttccccaagtcatagaaagaaaagtagacggtattattgacgtgaccgaatttatctacgtcgttgaagcgcaactggataggcagtgcatgatgaaatacgatttcttccattgttttcccttaatcttttttatttcgacgcaaaagtactacttttgcgtgttattctcaacagaaatagttcaagaaatgatagaagatattaaaaaagcctgtcaggtgatgaatgaaggaggtgtcatcctttatcccaccgataccgtatggggcataggctgcgacgctactaacgaagaggctgtacgccgggtgtatgagataaaaaaacgtgccgatagcaaggctatgctggtactggtagactctcctgtgaaggtggatttttatgtacaggatgtccccgatgtggcatgggacctgatagaagtagccgacaaaccattgactattatttattccggtgcacggaatctggccccgaacctgctggcggaagatggcagcgtgggtatccgggtgaccaatgaagaattctccagaagactttgtcagcaatttcgtaaagccattgtttccacttccgccaatatcagcggacagccgggagcggccaactttactgagatcagcgaagaagtcaagtcggcagtggactatatcgtcggcttccggcaggatgatatgagccgtcccaagccctcaagtattataaagttagacaaaggcggagtgatcaagataattcgtgaataaatgaaaagagaggagagacagagtttactacagcgttgcatcaaatggcgggaagctaatattaaggaaaagcagtttatcctgatattgagttttctggtcgggatcttcactgcgattgccgctttatttttgaagttccttattcatcagatacagaatttcctgacaaacaactttaatgcgacatcggccaactacctgtatctggtatatccggtgataggtattttcctggcgggatggttcgtgcgtaatatcgtgaaggatgacatcagtcatggtgttaccaagatcctgtatgcgatttcgcgtcgtcagggacgtatcaaacgacataatatctggtcgtctacaattgccagtgccatcacgatcggcttcggtggatcggttggagcggaggcaccgattgtgttgacgggttcggccatcggctccaatctgggaagtgttttcaagatggaacaccgcacgttgatgctgctcgtcggctgtggtgcggcaggggcgattgcgggaatctttaaggccccgattgccgggctcgtattcacactggaagtgctgatgatcgatcttacgatgtcttctctgcttcctttgctgatttccgccgtgactgcggcgaccgtttcctatatcacaaccggtacggaggctatgttcaagttcaacctcgatcaggctttcgaactggaacgtatcccttacgtgatcttgctgggaatcttctgcggactgatttctctctacttcacacgggcgatgaactccatagaaggggtattcggaaaactcaagaacccttatcagaaacttgcttttggcggtgtgatgctgagtgtgctgatcttccttttccctccgctctacggtgaaggctatgatacaatcgaacttctgttgaacggaacttcggcggcggaatgggacacggttatgaacaactccatgttctacggctatagtaatctgttgcaggtttatctgatgctgattatcttgttgaaagtgtttgcttccagtgcgacgaacggtggcggcgggtgtggtggtattttcgctccttcgctttatctgggatgtattgccggattcgtgttttctcatttcagcaatgactttgccttttccgcctatctgcccgaaaagaatttcgccttgatgggaatggcgggtgtcatgagtggggttatgcacgctccgttgacaggagtgttcctaatagccgagctgactggaggatacgatttgttcctgccgttgatgattgtgtctgtcagttcttatttaacgattatagctttcgagcctcatagtatttactccatgcgtcttgccaagcgcggtcaactcctcacacatcataaggataaggcagtgctgaccttgatgaagatggagaatgtggtggagaaagattttgtagccgtgcatccggaaatggacttgggagagttggtaaaagccattgccgcttcccatcgtaatatgtttccggtgacggataaaaagaccggcgaattgttgggaattgtcctgctcgacgatatccgcaacatcatgttccggcaagaactttatcaccgttttactgttaataaattaatgacatctgctcctgccaagatattcgatacggatggaatggaacaagtgatgcagacgtttgatgataccaaagcatggaatctgccggtagtggacgaagaaggacgatatcagggatttgtctccaaatcaaagatatttaactcataccgccaagtactggtacatttttctgaagattaaccggcaaggtgccggagccaggttactatgcagataacttctacgaagataataagaagattatgaagaaagaagatttaaggatcgtttatatgggtactcccgattttgcggtggaggccctgcgtcagttggtagagggtggttataacgtggtaggcgtgataacgatgcccgataaaccggccggacgcggacacaaaattcaatattctcctgtcaagcaatatgcactcgaacagaacttgccgttgctgcaaccggagaaactgaaggatgaggcttttgtgcaggcacttcgtgagtggaaagctgatcttcagattgtggttgcttttcgtatgttgccggaggtggtctggaatatgccgcggttgggtactttcaacttgcacgcttcgttgcttcctcagtatcggggtgctgctcctatcaattgggcggttatcaacggcgatacggagactggtatcactaccttcttcctgcaacacgagattgataccggaaaagtgattcagcaagtacgtgtccccattgccgacacggataatgtggaagtggtgcacgataaactgatgatcctcggtggtaagctggtgctcgaaaccgtggatgcgatcttgaatgatacggtgaaaccaattgctcaggaagatatggcagtggtgggcgaactacgtcccgctccgaagatatttaaggagacttgccggattgactggaattctccggtgaaaaaggtgtatgatttcattcgtggtctgtcgccttatcctgctgcatggagtgagttggtcagttcggaaggagaagcggtggtgatgaagatttttgagagcgagaagatttatgaggcacatcagttgcctgtcggaacagttgtgacggatggcaagaaatatataaaggtggctgtgcccgatggatttgtttctgtcctctctttgcagcttcccggcaagaaacgtctgaagaccgatgaattgcttcgtggattccgcttgtcggatggatataaaatgaattgatagaatgaactgaccacggtcaagctaacttagaacttaaaacaatagaatgatgaaaccgattatttctccttccatcctttctgccgactttggttatctggcgagagatattgaaatgataaaccgcagcgaagcggagtgggtacatattgatataatggatggagtatttgttcctaatatttcattcggcttcccggtgctgaagtatgtagcaaagttgacggacaaaccgttggatgtacatctgatgatagtcaatccagagaagtttatccctgaagtgaaagcgttgggcgcacatacgatgaatgttcactatgaggcttgtacgcatcttcatcgggtgattcagcaaatcaaagaagctggaatgcagccggcagtgacaatcaatccggcaactcctgttgctttattgcaggatatcattcaggatgtgtatatggtacttatcatgagtgtgaatccgggttttggcggtcagaagttcattgagcattctgtagagaaagtccgtgaattgcgtgctttaatagaacgggccggttcaaaagcattgattgaagtggatggaggtgtgaatttggaaacgggtgcccgactggtggaagctggagcggatgtgctggtagccggcaatgctgtcttcggagcaccggacccggaagagatgatccgccagttacacaagttgtaacggacacattgaatactgcctctttacatcagtatccttatatacgcctgattatcccgtggatagcaggcgttttttgtggagattgcttctttgatcaatcgacggaactgttttggagtattctgaactttggtctctttgccggactgtgcattgccctctattttctgaaacggcgttcacttcggtggtgttttggaatatctgtctttgcactttgtttcgcaggcgggtggctaggcattacttgtcaattaaaacaaacggtatatgactttccggagaaggaagcggtttatcgggtacgactaacggatactccggagactaaagaacggacgttgctctgtagggtattgcttaaagagctgcgagattcgtcaggggtatgtccgatagggcgaaaggctattctttatttgcagaaagattcattgtttactttattgaaactgggggataaacaattaaagataggagatgaactgctggtatctgcccgcattgctccacccgctaacggaggaaactttgatgagtttgactatgcccgctatttgatgcgtcatggcattagtggaacggggtacgtagcatccgggaaatgggcgttatggtcaccatctatcaggtatactgcgatgttttgtcaggaaaaggtgataaacctttatcggaagctgggatttgaaggagatgaactggctgtgctttcagcgttgaccgtgggtgagaagaccgatttaagtgactctatccgtgaaagttattcagtatccggtgccagtcatgtcttggctctatccggcctgcatatagggcttttgtatgctttgcttttcctccttttgaaacctctagcaaggaagtggcaggcagggcgatatttccgttccgttctgctccttgttttattatggtcttttgccttttttaccggtctgtcaccgtctgtcgtccgttcggtaagtatgttctcggttttggcaatagcggaactgttcggacgccaatcattgactctgaatacactggctgctaccgcatgggtaatgctgttggtcaatccggcttggttgttcgatgttggttttcaattatcttttctagctgtactttctattttgatgattcagaaaccggtctatcagttgttgcctgtgaagagcaggataggaaaatatgtttggggattgatgagtgtatcgatagctgcgcaaataggaattgctccgcttgtaatgctgtatttctcccgtttctccactcattttctgctgactaatttagtagtcatacctttggtgactgtaactttgtatgctgccgttcttatgcttcttctgactccactgcctgccgttcagtttgttatggcgggagcagtcagattcctgttgaaagtgctgaatgattttgtccggtgggttgagcaacttccttatgcttccttggatggtatctggctttatcgtctggaggtgttgggcatctacattttcttgttgctttttctttattatttgaagacccgaaggttcaggaatcttgttgtttgcttttcctgcctgttgtgtctgggcatttatcacacggtcatgcgctggtatgaccgtccttgtccgagccttgtattttacaatgtccgtggttgtccggcgattcattgtattgctgaggatgggacttcttggctgaactatgccgataccctttctgataagcgccgtttgcaggctgtagcggctaattattggagacgtcatcaacttctgcctccaatagaagtaacggctgattgtcagaacgttgacttctgtcgtcatcagcagattgtattttatcatggctaccgtatttgtatggtgaccgataatcgatggcggaacaaatctgccgcttcaccgttatttattaattatatgtacttatgcaaaggctataacggtcgtctggaagaacttaccggactcttttctccatcttgtatcctgttggatgcttccctttccgatgatcgcaaacagttcttccgggaggaatgtaagagactgcatctgcattttatcactctgtctgaagaaggttctgtgcggtttttgctctaagtacgaagaattatcgtacatttgcaactcgaaaaagaatatggtatgttgactaaagtaatagaacaggcaaaaatcgaccactttaccaagtggtttgagcgcgctgacaaaatagtaatcgtttctcacgtgtcgcccgacggcgatgctatcggctcttcactggggctttatcacttcctggattcacaggagaagacagtaaatgtaattgttcctaacgctttccccgatttcctccgctggatgccgggcagcaaggatatccttttgtatgaccgctataaggactttgcggacaaattgattgccgaagctgatgtgatttgctgtctggactttaatgccttaaagcgtattgatgagatggcggatgccgtggcagcttctccggcacgcaaagtgatgatcgaccatcatctttatcccgaagaattctgtaagattaccatgtcttatcctaagatatcttccacttccgaactgatattccgtctgatttgtcgtatgggctacttcagtgatatttcaaaggaaggagcagaatgtatctataccggtatgatgacggatacaggtggctttacctacaattccaacaatcgcgagatttattttatcatcagcgaactcctttccaaagggattgataaagatgatatctaccgtaaagtatacaatacatattcagagagccgcctgcgtctgatggggtatgtgttgtcaaatatggtggtttactcagattacaatgccgcattgatatcgctgacaaaggaagaacaaagtaagtttgactatataaaaggtgacagcgaagggtttgtgaatattccccttaccattaagaacgtatgtttctcctgtttcttgcgggaagatacggaaaagccaatgattaagatttcgctccgttcggtcggtactttcccatgcaatcagcttgcagccgaattttttaacggaggcggtcatctgaatgcttcgggcggtgaatttttcggaacgatagaggaggcgaaagccgttttcgaacaggcactggagaaatataaacctttgttgacagccaaaagctaagaatggaaggttaaaagtagacagagaaaggttaaaagttaccaactttcaactttcccctttcatctttcaatgaatttgagatacatttgtgcagaatatagctaaataacagataatgaagaaacttgtatttttatttctctctttgttggcagccggaggtatattccaggcgtgcgacgattcaaagacttacgctgaaatgttggaggacgaaaagaatgcggtgaataaattcatcaaagataaaagaatccagatcatttcacaggacgaatttgagaagaatgatactgtcaccgatttgatccggaacgaatacgttgccctctccgatggtgtatatatgcagattgtagatcgtggaagtgccgagaacaaaacggatactttcgctaacaacaatgaaatctgcgtccgttatatcgaagaagatataatgacacgcgacactacctgtttcaatgtcttcctcgaagagtggggagatgcaaatcagctttacacgaatcccgctgtattccgttatgtagccgaaggcagctatgtgtacggtactttcatacaaatggactattactgggcaagttattatcagtcaacagcagtacctgcaggctggctgcttgcactaccttttgtgcgcaactacgctcacgtacgtttgatcgttccttccaaggtaggacattcatcagcacaacaatacgtcaatccatactattatgatatttggacattcagcaaagcactgaattaacccccatataaatcttagttaaaagacctatgactctaatcaaatctatctctggaatccgcggaactattggcggaggagcgggtgagggactaaatccgcttgacattgtaaaattcacctcggcttatgctactttgattcgtaagacctgtaaggcacaaagcaacaaaattgtagtgggacgcgacgcccgcatctcaggtgaaatggtaaaaaacgtagttgtcggcacactgatgggaatgggctgggatgttgtagacatcgatctggcttctaccccgactaccgagctggctgtgacgatggaaggcgcctgtggcggtatcatcctgacagcttctcacaaccccaaacagtggaacgcactgaaactactcaatgaacatggagaattcctgaatgcggaagaaggcaacgaagtacttcgtattgctgaggctgaggaattcgactatgccgatgtagaccacttgggatcttaccgcaaagacctgacttataatcaaaaacatatcgacagcgtactggctctcgaactggtagatgtggaagctatcaagaaagcgaatttccgtgtagctatcgactgtgtaaactctgtaggaggtattatccttccggaactcctggaacgtctgggtgtgaaacatgtagagaaactctattgtgaacctaccggaaacttccagcataaccccgaaccacttgaaaaaaacctgggtgacatcatgaacctgatgaaaggtggaaaagcggatgttgcattcgttgtagacccggatgttgaccgtctggctatgatctgcgagaacggtgtcatgtacggtgaagaatatacattggttactgtagccgattatgtattgaagcatactccgggcaatacggtttctaatctgagttctacccgtgctttgcgtgatgtaacccgcaaatacggtatggaatatagcgcctctgctgtaggagaagtaaatgtagtcaccaagatgaaagcaactaatgctgtaattggtggtgaaggaaacggtggagtgatctatcctgccagccattacggacgtgacgccttggtaggtatcgctttattcctcagccatctggctcacgaaggaaagaaggtgagcgagcttcgtgctacttatcctccttatttcattgccaagaaccgggtagacctgacaccggaaatcgatgtggatgctatcctggctaaagtaaaggaaatctataagaacgaagaaatcaatgacatcgacggtgtgaagatagactttgctgataagtgggtgcacctgcgcaagagcaacacggaagcgatcatccgtgtgtacagcgaggcttcgactatggaagctgctgaagagatcggtcagaagattatggatgtaatcaatgaactagccaagtaacagcacaatttgttttaagcataataaagagagggaggactaataaacgagtcctcccttttttcatgtctttctgagatacctatttgttaatgtgaggtttgtaaccgctgaaggcgaaaaaaacttttggtaatttgctaccgaaaatatacctttgtgcatattattatctgattactttccaaaatgctatgagaatacgcctgattctagtttttatcacattgatttgtccattgattagcatagctgacaatgtaaaggatgcctatcttttccaaaaggtggactaccagcagggattgtccaatagcgctgtactttgtctttttcaggataatgagggattgatgtggtttggtacctatgatggggtaaattgttacgatgggaaaagtatggaagtgtttcgttcagacttttcggaacaaaagacgctgagcaataacattattcattctattcagcaggcagacagcagttgcttatggataactacacatttgggagccaatcgtttttcgaaggattcacggcaggtaatctgcaattacgaatttgacactgatttcgtgattcattccaaccatgcaggtaatacatgggcgttgagttatgactggattgcctattacaatacccaccatcgccgttttgtgcggattccgatgcccgatattaaaatgctgaaagtagatgttcgcgcgtttgttaccgacgaaggtgaattataccttttcccttatgaaagcggtgacctgtatcgtttctctttaaactctttcgatcaggataccttgtctacgcgtctcactactactccctcacattttcactccaagcagatacagtatgtctgctatcagaatggtgtattctgtttctatgattcggattatgatctttttgtgtatgatatatcaagaaagtctaagatttacatccgtaacattggtgagatggttcataaatatgggcaaataacgggaattgtacctttctatgaggatattgttatcgcattccagacgaatggtctgattcgcttgcgtctttctcaaaagtatgcagaggagattatcgatcagaatatgcgtatctatggtatttataatgactcccggcaaggggtactgtgggtaggaaccgacgggcaaggagccattatgtattccaagaagtattctattgccactaatctgatgttaaacagtttctcacctaatttgacccgtcaggtaaggtcgataatgaccgacaaatacgggggactttggtttggaacaaagggagacgggctgctgcatgtgaaaaactatcgggacggggtacacgcatccaacacagaggtttactcgctggataaaaagcagaatgcgatgtcgtatgtcaagcagaacagggaatttcaggtatactccatgttggagagccgttataggaatggattctgggttggaaccggctcttcgggcttgtgctattattcttttgataatggaaagttgcatgaactttcaaatagggaaacaggaactggaggagaagtggcagaagtgcattccatctttgaggaaagtgacagtgtcctttatctggcgacttcgggtaaaggtttttataaagtaatagtagataacagtaagcaggacgttcaaatcaaatcgtggaagaattatcgtttttaccatgagcaacaagagcttaacctcttttatagtatggtgccacaaggagattccctgttgtggctgggaagcaggcaaaagggattgatacgttttgaccggaaaacggaagagtatcagatctattccctgaatgagattctgcataaatctgttgacgatattctctgtttgcactggcatggagagcaattgtatgtgggcactacctccggcttggtgcgcgttacttttaaagaacgcaaactggaagcggattatatcggtcgtgaacaagggttgcttaatgacatgattcatagtattctggaagatgccaacgggctgctgtggctgggtacgaatcgcggactgatcaaattcaatccggaaaattcattttctcatgcctattattacagcggaggcattcagataggagagtttagcgatgatgcatattaccgttgtccatataccggttgtcttttcttcggaggaatcgacggattgctctaccttgataagaaggtgtcggcagcaccggaatattatccggaaatattattgcgtaagctgatcatagaaaagacatttgtcaatttgcaagaccattatttgccggacaggaaagggctgcggatgcagggagccaatctttcgttttctttattctttgttgtacctgattatgccagtggtggcgatgtggaatactcgtatatgctcgaaggttatgataaggactggggagctttcagcagtgtgaatgaagcatcctatttcagcgtcccgtccggagattatctgtttaaggttcgctataagaaagatgtgtttgctacagaatacaagaccttcacgattcccgtacacattctgcccccttggtatcgcacagtgtatgcgtacattgtttatatactattgggtatcgtattggtaatgtatgtgattcatcttttccgcaagtattttcgtcatgaacggatgatgaagaaactgctggagtcggaaaatcgaaatatatctctggcggcggatagttatcaggcgcgtgaggtgctcaatacttgtactctcatttatcaggcttgtgatcagctaaacgacaagaatatctcctctgaaggacatgcagagaaaataggtcagattcgtgaatccgtgatgtccttgctctttgggtgtgggttgggtgatgaatgtttccgtttgttgtcgtcgctgcatttttcggtttcggggcgtttgtctcttttgaagatggcggaagaggtgcttcaagtacttgaaaaagaaggccatgatgtctcttcgatacagttagacattccggaaaatttcacttatcccgcctataagaatgcgttacgttgtatcctttatttcagttacctttatatttccagttgtaagacagagaaggtatcggtgacggtgacagaagaagcaggttgtatgatgctgacatttgtttctccggatgaaacagtgaaaggattgaaggatgtattgtccggagaagaactcttgtctatcagggcgaaagattcggatgatatgttcaggatacggaccatgcaacgtttcgtgttttctgcattgaagcagcagaatagtgtgatgcgctatataacccctgtagggcaggataatcagttgactatcacatttgatccggttgttgtggcagagcagaatgaagtgagaaaaacagttttgttgttggaagacagggaagagatcgtctggttgatcagtgcgttactttccgatgagtatgaagtccgttcagtgcggagtgtgcagttggcatttgacgagatgcataagtccgcaccgactttatttctggtggatatgcttatgtatgccgatgcggaaagtacttttataaagtatgtcaataagaatcgttctatgttgtcgaggacagcgtttattccgatgttgacatggaaagtcagtgcgtctatgcagcgggagttgattctatgggcagattcttatattgttcttccttatgatataccattcctgaaagaaacgatccataaagtgatttatggcaagcgggaagccagacagatttatatggaagacctggaaggctgggcagattctattgtttgtaccactacggagcaggcggattttgtcaggaagttcttgcaggtcatggagcagaatctggatcgtgaagatttgggctccacgtttgtggcagaacaaatgttgatgagttcccgtcagttctaccggaagtttaaggagatttcgggtatgtcacccagcgatttgattaaagattaccggatggagaaggccgcccgtttgttgcagaacgaggaactgtctattcaggatgtaatttccgatgtaggtatatccagtcgtgcttacttctacaaagagtttacccgtaagtttggcgtaactcctaaggtatatagagagaagcttttagggaatgacactcataaaaatcaggagtgaacagccaggaagcggtctggtattagttgccaagaaataaattcccatgctgatctgtgctgctttttaaggttggtctcctttgtactctcttttgttttccattatttattattctgatatatagggtattatccagtactctattttaccatctgtactttaaacagacattttttctcttctctgttttttggcgcacaggagtatctcatttctttggttattcctttaatttgcgtcaacgtattaaacgtatttggtaaccttattattattaattaaaaacaagtagtatgaatttgtttggaatgaaaaaacatcgcatcaggtcattatggctactgctattgttacttacgtgtagtgtaacagtatgggcgcaaggaagttccgtcacaggccgtgtctctgatgaaaaaggagaactgctcataggggtgagtgttcaggaaaaaggtacaacgaatggtaccattaccgatatgaatggtcagtataccttgaagctttcaacagggaatcctattctgctcatatcttatataggatataagccgcaagaggtaaaggtagcaaagcaaaaaatcgtagatgtcgttttggtggaagatgtgtcgtcactggatgaagtggtagtagtgggttacggcaatcagcgtaaagtatccgtggtaggcgctcagtctacgatggatgtgaaagacattaagatgcctgctgcaagtctgtcttctgctatttccggacgcattgccggggtggttgccgttcagcgtagcggcgaacccggtcacgatgaatcggatatctggattcgtggtttatcttccttgctcggacagagttccagtccccttgtgctcgttgatggggtagaacgtagtttcaacaatatcgaccctgaagatatcgaatcgtttacagtgctgaaagacgcttccgcaactgcagtatatggtgtacgtggtgccaacggagtcgtgattgtgaaaaccaaacccggtaaagtaggcaaaccgcagtttagtgtggactattacgaaagttttacccgcctgaccaagaaagtagatatggcagatgcctacacttacatggatgcacgcaacgaggcgcagatgaatacaagcggtacacttaaatattcggctgcttatattgaagcgacaaagaaggccaacggtttattgccgaatgacaatccccgattgtataatccttacctgtatccggccatcgactgggcagataacctgttcaatgactggggacacaaccgtcgcgggaatattaatatccgtggtggtgtacctaatgcaaactattatgcttcattgagttactacggagaaaccggtatgacccgcaacttcaagctggagaactacaatactcagatgaagtatgaccgttataacttcacctccaacctgaatctgaagccgacttccaagacgacggttgatctgggtttttccggttatctgggacagggacactatccgcagagcagcaccagttcgctgtacgcagcctgtatggatgtgaatccggttatttatcctttgttgctgcccaacggtaccgtgtccggtatcaactcacagcaaaagttcaacccttacggtctgctggctcgcggaggttattatgatgaattttccagccagttaaattctaatatccgcgtgaagcaggacttggatttctggaagtggagcaaaggactttccgcttctgccatggtagctttcgatacttacaattcacgtaagagaaagtataaccggaatgaaccgatgtacacctttgccggtaaaacggatgaaaacggaatctggatagaagacaccttgtttgatgaagaaacaggcgattacctctactcggtgctgaaagaagcggatggtagcctgtcacttcagacaccggagcaatggagcagccgcacggtgtatacagaagcatccttgaactatgatcgtagtttcggtgctcatcgggtaggaggtctgttgctttacaatcagaaagtatattgggatttgaatgcgacggatgtcattggcggtatgccttacaagcaacgcggttttgccggacgtgctacttattcatggaacgaccgttacttcgcagaattcaatctcggtatcaatggttcggagaacttcagtccgggcaagcgttatggtgtcttccctgcttttggtctgggatgggcagtctccaatgaatctttctggaatccggtccgcaaatacatttccttcctcaaattccgctatacggacggatgggtcggcagtgataccgcaacaggcagacgcttcatgtatcagggggtgttcaccggtctgacaggaaccatgttcggaaccaattatacaagtgccaacggttatggagaagaaaagtatggtgtgaatgtcacttggtctaaatccagaaagcaagacttgggtatcgatatcaagttcctgaatgataatctgtcctttgtagtcgactttttcaaggaacgtcgcgacaacatcttcctgcaacgcagtacaatccccagctacgccggatggatcgaaaacccttatgctaatctgggtgtcgtagaaaataaaggtatagagctggcgatggactatacacaacggctgggtaagaagacattccttacggtacgtggcaatctgactttcaataaagacaagattatagagaacgacgaaccgccggtagactatccttggatggagacacgcggtacgaatgtaaatgcgacttggggattcatagccgatgggctctttaccagtcaggcggagattgaagaccatgctacccagttcgggacagtacatgtaggcgatatcaaataccgtgacttgaacggagacggggtgatcgacaactatgacaagaccgtcatcggacgcggtgatgtccccagaatctattacggattcggtgctgacctacagatcggagacttttctatcagcgccctgtttcagggaaccggacaggccgaccgctatctggacggcatttgtatcaagcctttctgggatgacgaaggccgtgacaatgtctttgccaacatccacgaccgctggagtcccgacgatccgaccaatcaagatgtgttctatccgcgcatgtatgtcggcagtgacgccaacacgaataatgttcagaaaagttcgtggtgggtgaaagacgtcagcttcctgcgtctgaagcaactgaacatatcctataatataccgaaaaagctgctggacagatgtttcctcaaaagtgcaagcgtctacctcatgggtacgaatctgcttaccttctctaacttcaagctgtgggatccggagctgaactcaagtaatggaacagcttatccgaatgtatccagctattcggtcggagtcaagtttagtttttaaccctaaagtcaaataatcgttatgaagaatagaataaaacaatacctgttggctgcatcgatgtgtgtcggactgactgcttgcagtgatttctttgaaccgattcccggtgtgcagtttggactggacgaaacgtttgcctccaagcaaaggacggaagaatatctgaacaatgtatacagctacgtgcgtgaagtgacagatgccattcatccgaacacctacggaggtatctttacggaagcatcgttggacggagcaaaccgctggaacaaaacgtatgcggaatggaccaacggctcctttaactccgcttcagctcaggcaagtgaatacttttcaaagtactatcaggcaatagccaaagcaagtacgttcatccagaacgtagataaatgtacagaagccgccgcctctacacgtggaaagtggaaatcggaagcacgtgcattgcgggcatactattattttgaattgctgcgcctttacggtcccattccgttgattggcgaagatcccattcctttggacgcttccttggaagaactgattaaagaacgtaattcggtagatgaatgcgtaaacttcattgctacggaattgcagagcgccattgattccggcgatttgctccagagagccggaaaggcaaacctgggacgtatggatgtcgccacttgtatggcactcaaggcaaagctgtacctctattgggcaagtccgcttttcaacggaaatacggatcaggcgtcagtcaagaataaagacggcaaacaacttttccctcagaccgaagataactccaaatgggctcaggcacgcgatgcatatgaacggtttatgaccttcgcaaccggacagggatacaagctgaccgaggtctatacgaatggaaaactagacccttatgcttcgtgcagggctgcgggcgagtttttcaccacaacctgggaagctgttgatgaactgatttttgtgaaactgagagatttgtacgactatacctactgggtatgccctaagtttaccgacttccaggataccgatgtgactggcggcggtggctattatacaacacaggaaacggtagacctgttctttacgaaagacggactgaccatcgaagaagatcccggctatgacaaattcgagggcataccgagcgccaacaacttcacatccggaagatattatgaccccaataacccttcccgtctttactttgacgccgataagtccaaagtgctgaaacagtggaaagaccgtgaaccgcgcttttatgtgaatattacctatagcggctctatctggctgaacgaaggtaagtacaatgaggaaatgcgcacagacttcaccaacggtgcaaacggaacctgcggcaagtccaaagcctccggcgactgtccggattcgggatacttgatccgtcggggtgcgaaagcttctaacaacaacggctcgaaacacttctctccggtacttcgtctggcagatatgtatttgggatatgccgaagcactttgtatgtgcagcgatctcgacaatgccctgacttatctgaataaaatccgtgtccgtgcaggcatccccgaatatacatttaccgcaacagccggcaaaataacctgtccgaagacacagaccgatctgctgaaccgtatccgccgcgaacgtttggttgaactagtcttcgaatggaaccgctatttcgatgtgcgtcgctggaaagtggcggaaggacagaatgatcccgaacattggatctatccggcatatcacaccggaggcgaaggaggcaaagtatacggtatgaatatggacaaggattatccggcattcttcgaaaggacctcttttgagactcgtgtagcatttacgaaaaagcaatatttcatgccgataccttatgatgacctccgtcgtatcccgtcactggtacaaaacttaggatggtaatacgatattcgaacaataacgcttaaacaagaagattatgaaacattggaaagatatagctttcgggttgtttgtctcactgacactggctgcctgctacggtgaggaagacagcttcgcaactcctgacatctataaagattatcagcctgtactgaaagacgggaataccgtagccggatatgcggctgcccctctcaaagaggcgaaatatgatgaggtgctgaatgaactttacctcacgtgggacggcagtaactctggctgggaaaagagagatgaatatgtgggagtggaagtagaattcaactccctgctctccggcaaaaagataaagcgcgtcatgatcccgaatgtcggtgattttggcaacctgactgtgaaaaggcgggattatggcaacgagccgaccactctgcgtctgagtaaatatcgtacagtagtggttacagaccgttacggtgtagaggaacttcgtttccgttctatctacaaagatgccgacggtgcccggcagacaagtgactggacgaatctgagcgatcaggcggataagtatgaacttcaagtggatatgaactatgctgcctggcagtattttaaaaccagccaggcgacacaagttcagatttcctttgagagtgattcggagatacgtcccgtttctgcattgtataatctgataggtaacggagatgaggctgctactcaggaagagttccggaaatggtattatatggattgtgcggctatgtcattcgacccctataatctggctttcgacccttacagcaaactgcgtgtctttatcaagaaagaccagaccggaggagcgtatgcgatagattaccccacccataacgaaggaagaggtattgtttatccggcttcggaaagcaatccgaacgatgcgtggtggaaactgccggacatgcagcatgtgtttatgcacgagatgggacactgcgtgcagtggatgcccaaacaaggaaaatatatcatggaaggtgtgcaggattgtgaccggcagggatatcaggaaggatggccggacgctgtgaaagtagcgagcaaaggatatattctggctacgcaaaaagaagaatatcaggctgctatcgccaagtcttaccggaatccgcagagtgataaatactttgtctggcaggttgactataatacttccggtgcttttatgagttggctgcgtctttataatggcgacttcgtacgtatgttgccgtggacggtgctgatggacgaactgaccaaccagtggagcctggaggatgcggtgaagtatatcctgaaggagagctacccggaccttacgatggaagaactctggaacgaatacaagacagaggtggaagtgttcctgcaaaataactaatagagcaacctttaaaaaacaactatgatgaagaaagtattatttgcattagctgtgctgtgcacgagcttttggagttgcaataccttggatttgaatgacgtgggctacggagatggtgaccgtctgaaggcttcctccgttaaagaaatattgtatggcacagctgatggctgttggaaagctgactatcaggggcacgagttttacttccagtttcatgaagacggaacagtgacactggattcggactttctggagatggcggtagaaggaaaaacatcattctctgccaaaggcaaggaagtggcactggatattgagaattgcgatgtccatctgcaaaacctgggtagtgaatttgcagataccaagtttgtcgtatcagagattccggcagaaggagaggcgccacaactgaacttatacggtgaatctaccggcaataccattgaactgcagccgactacacaggcatacatcgatggtaaagttgcttcaaaagcggactttaccgaactctttgagaaaaacttattggataatcagtccatctgtgacgcttccggcaattttatcggttattatggcttggtactgaatggtgtcaatgatctttctgtcaaggtaataacgattgaaaacaaggatggaagcgatgcgaacggccatacgcaatattatgaatctaaactgacgaaagaagggcaaatcttcaaactggacacgccggtagaacagattaaatcggtgaacggagccacttatgccttcaaagccattgattgcaccggtgatgcggtggcggtagacggtatgtcaaatgtaaccctgacctccaacaagggagcggtcaatgacttcgactatgtgacttccggaggaaaattcacactcggaaaagcgcaggatcatggtgccgcttgcgatgaaatatgggcgggaacaggcggacaggctacaagctccggtggaacaatcgccgatataaatgccatgagctatgatttcggatggagtggaagcgcgaagcaaagaccgctcgttatctggacatggtggtttgcaaacctcgctttcccgagcagtgaagaaggagcaagcatcctgatgaataattccgataaagaccgtgtcttgtttaagaacatatccggcagcggacagacttgcggcggcggtactcttaacgcgactgaagtagctgagataaatgcctactgtaaagacctgatagatacctggttcaatgagaaagggctttttgttgttcgtcacgaccgtcagagtgcaggagataaattctacatctatcttttgtgtcccgatacggaagccacttcgaaaggtggaatgtggatgaagtatcagagagactgagaatgaatgtgaataagatagtataagctaatgatgctaacgtacttaactaattaataattaataaatgaatagatgatgaaaagactgtttttactgatgatcctgggtgtaacttcggtgttatgcctgaatgctcaaactaagtcgttgcaccagctgcaacaggaattcgttgatttacgctgtggtatgttcattcatttcaacatgccgaccttctttaatgaggactggccggacccggatgctgctcccgagcttttcaaccctgtcaggatggactgcaaacaatgggcaaaagcggcaaaatcagccaacatgacctacggatgtctgacaacgaaacatcatagcggtttctgtatatgggatactaaaacgaccgattatagtgtaatgagcagcccgttcaaacgtgacgtggtaaaagaatatgccgacgcattccgtgccgaagggatgaaagtgatgctctattattcgatcctcgatacgcatgcccggctgcgtcccaagtgtataactccgcagcatatcgaaatgatcaaggagcaacttcgcgaactgttgaccaactatggtgaaataacagctttgatcattgacggttgggatgccccgtggtcacgtatctcttacgatgacgtaccttttgaagatatttatcgtctggtcaaatcaatccagcccaactgtctggtgatggatttgaatgcagcgaaatatcctgccgaggctttgttttacacggacatcaagtcttacgaacaaggagccggacagcatatctcgaaagataccaaccgtctgcctgccttgtcttgcctgccgttacagcagaactggttctggaaagaaagtttcccgactacccctgtgaagtctccggcacaaatggtcaatgataatatcatcccgatgggcaaatcctactgtaactttatcctgaacgtagctcccaacagagacggcttgatggatgccaacgccttgaaagctctgaaggaaataggtaaactgtggaagaacgacggtcgtgtagcaacggttcccgaagcggatgctcctattatatcttccaacattgccaaatatcagcctgccgaaggtacatggagcagtgactatgctatcatggactttgccaatgacgatgatttcgggacctgctggaattctaatcctgaagtgaaagtgccctggtattcggttacttttgagcgcgagaaatctttcaatatggtggttattacggatcgtaacaatgaccgtttgcaggaataccgtctggaataccgtgcgggtggtacatggaaacccctttacgaaggtaaggctcctaccggtctgcgtgtgaaaatccaccgtttcgatacggtttggggagatgcggtacgaatgactgtcttaaactctaatggtactacctccattgcagagttcggggtatattgtgagagaagatgatgaatttatcttagagttaaatcattgattttatatagaatcaccatcaggtaaagtcgtgttttttgatggtgattctatttcatccaactctttatcgtacgtccgtacttccctttttgtgggaattgcgtgtagaataatatttggatttaggccaaacatttgtatcagctttctaatggtctatccgatggcttttgttacttttcttacttattaatgtctcatttatattatatttagtatatttgttcccgctttatctaataagacatgaacaataacacttgctattaatataatgagaagatgtctgatattatgcctttttacatttattggttcgttggtctgttgggctgatgcgggtaaagatgcttatctttttcggaaagtcgattatcaacaagggctttctaatagtgctgtgctttgcctctatcaggataaagcagggctgatgtggtttggcacttatgatggcgtgaattgttatgatgggaaaggtatcgaggtctttcgttctgatttctcaatgaaaaagacgttgagtaacaatgtcattcattctattcagcaggcagatagcagttgtttgtggattactacacatttgggagttaatcgtttttcgcaagattcgcgtcaggtagtgggatattatgattttacaggtgattattatctgcattccaatccgaaaggagatacttgggtagtaagcgatgaaggaatcttttattataatacttatcataaaaagtttgtccatctcaaaaatatagagactcctgtcgagaatatggatcagcgtgcttttgtcacggatgatggtgtcttatggacttttccacggaatacaggtagtctgattcaatgttcattagatggctttgaccgggatacattgtctgtccatcctactgtttcatcttctgattttcatgcaaaacctatcgataatgtattttatcagaatggcattctctgttttgtggatgcagagcgggatctttatgtatatgatatttccagaaggtctaaaatctatattcgtaacctttcttcgttggtgcaacgatatgggaaagttgtgggaattgttcctttttatgaagacattataattgcttttcaaaccaatggtttagtacgtttgcgcacctcgaaaaaatatgaagaagaagtggtggaccgtaatgtacgtatatatgatattttccgcgatcctcatcagaatattctttgggtagcttctgatgggcagggagctgtcatgtacgctaagaagtactcgatagccactaatctgatgcttagcaaactatcatccaatctaagtcggcaggtacgttctgtcatgacagacaaatatggcggattatggtttggtacgaaaggagatggacttttgcatgtacatgattatgaaggtggtatggatgcttctgctactacagtttactctccagtaggcaggcaggatgcctcatcttatacccgttggaatagagagtttcaagcatactcattaaaacaaagccgttatatggatggcttttgggtaggatcgggtaatcccggactgttttattattcttttgcagataaagccttgcattgtgttgaggataagtctgcagatcctgttatcgaaatacatgatatctatgaagagaatgacagcgtactctatgcggttacggctggggtcggatttcgtaaattgatattggagaggaaacaaggggagattcacctcaaatcgcaaaagcgttatcatttcttttatgaacaaaaagagataaccatgttttatcctatgttagctgaaggagattccattctttggttgggaagccgggaaaaagggttaattcgatttgataaacagacagaagaatataaagtcatttctttgaaagaaatattgcataaatctgttgatgatgtacttagcctgcatcgtgctaaagatggtaggatgtatgtaggaacaacatcgggactagtgtgtttgacctttaataaggaacaaatcagtgcctcctatatcggtagagaacaagggttgcttaatgatatgattcatggcatattggaggatgcaaatggttttttatggcttggcactaatcgtggacttattaaatataatcccaaaaacacttcttcgcatgcttattattatgccgccggtgtgcaggtgggcgagtttagtgatgatgcctattatcaatgtccttataccggacgtcttttctttggaggcattgacggtttgctttatctggataaggaagtggcgacagctccggaattctatccgaacatattattgcgtaagctaatgattggacgtaaggaggttaatctgggggattattataccgatggtggcaaagcgttaagttttaaaggagcgaaggcttctttttccctttcttttgttgttccagactttcttactggaggtgatgtggagtactcctatatgctggacggatttgataaagactggacctcgtttagtagtataaatgaagcatcgtatctagaaataccttcgggtagctatgttttaaaggtccgttataagaaagatgtatttaatacggaatataaggtattttctatccctttgtacattcttccgccttggtatctttctacggtagcctatgtcatttacttgctgtttttcatattaatagccggttatctgattcatttattaagaaaatattttctccagaagcgtatgatgcagcggctgttgacagcagaaagcaatgaagctctaccggagtccgccagtcttaatcgtgagttactgaatcgttttacgtccatttatcgctcttgtgatcagttgcgtgcggaaaatctcccttatgaacagcgtctcagaattatggagcaggtacacgagacggttattgcaactcttttccgttcgggaactttggctgtagaggaacttaagtcatttttccctacggaatatgcgattactggttgtatgtgcatgaaagagctctctatagaagtcttgcatgtgttggaaggacagggcgttgatatatcttctgtaaaacttgctataccagaacactttgtttatcctgtttataagaatgctttacgctgtatgctctattggtgttacctttatattggcggagtaaaacataagtcggatattgtagtggatgtgaaggaagaggaaggacggatgttgttgcagttctctgctgtagatgatactctgaaggaattatataagcaactttccggttcggaagaagagggaagaagagatagtaaggaaacagaagaggcgataactacccgccaattactgttttctgtgcaagcggctttgagacagctaaatgttacgcttcactatgccgacagagaaaaggatcatttattgacgttagcctttgaaccggctatcatcaaggagactgaagagcatgggaagaaaacggttcttctgctggaggatagggatgaaatggtatggctgataagtgatctcttagcagatgaatttgttgtttgtccggtgaaaagtgtacaacttgcatttgaagaaatacgtagatcggctcctgctttgttactagttgatatgttgatgtatgcaaaagcagagagtgacttcctggaatatgtgaataagaatcgtactcaactttcgaaaacggcatttattccaatgttaagttggaaagtaagttcgtccattcagcgcgaattgattatgtgggctgattcatatattgtacttccttatgatattatatttttgaaagaagccgtcaataaagctatttacggtactcgggaggcaaagcagatttatatggaagagcttggtgactgggccggacgcattgtttgtactacagaagaacaggcggactttatccggaaactgttgcaagtgatagaacaaaatcttgaccaggaagaattgggatcaaccttaattgccgaccgtatggcgatgagtccgcgtcaattctatcgcaagtttaaagaaatatccaatgcggctcccagtgacttgataaagagttatcggatggagaaggctgcacgattgttgcagaatgaagaactttctattcaggatgttatcgctgaagttggtatttccagccgttcctatttttataaagagtttacccgccgattcggaatgacgccgaaagattatcgggagcaactccgataatgctatccccactatcttattctttactaattgagttttatggatgtattacccgaatccttagatcagtaattccggataattaagtctttcgaggtccttatttattcgttccactatagttgggcgcaagaggaactatagtgcttcttgcgtccaactatagtggaacgaaagggaaactacagtagaacgaatgaatttggactgataagaaattagtttttcaaagtctttcggttaatgattcgggattccttcattccttctgttctttggtcgtttggggtgacagatatatttgaattcatgtctgtatagattttatttattactgcttacgaataaactttttaataaaagtggcgaaaaggcggctattataacttgatacaatgtgcgcaaacttgtgctctgtttgtgcgtgaatgaatgctatgtgttgatatatagatgtttataatgtgctttatttctcctttctgttctataaatgagcattttcattttgacataattttgtcacttctgcggaatattcttaatattaaaagtttttaatttgcttccgcttataagaattatataggcgattgataaccttagtattaattaaaaaaaacaaagtaacatgaatttgtttgaaatggaaaaacatcacacaaagacattgtggctattggcattactgctaacatttagtacagtagtgtgggcacaaggtactcctgtaacagggcgtgtgtctgatgaaaaaggcgaattgctcattggagtgagcgttcaggaaaaaggtactacgaatggtaccataacagacaccaatggtcagtataatctgaaactgacgagtaacaatcccattcttatcgtatcctatataggatataaatcacaagaggtaaaagtaggcaaacagaaagtgctggacgtaattcttgcagaagatgtatcgtcactggacgaagtggtagttgtggcttacggacatcaacgtaaagtatcggtagtaggtgcgcagtcatctatgaaaatagaagatataaagatgccgacagctaatttatcttctgctattgctggacgtttgccgggtgtagtagctgtgcaacgttcaggagaaccggggcatgatgattccgatctttggatccgtggtatttctacactggcgggtcagaactctaaaccactggtattggtggatggtgtggaacgtagtttcaataatatcgaccctgaagatattgagtcgtttacggtgctgaaagatgcttctgccacagctgtatatggagtacgcggtgctaatggtgtaattctgattaaaaccaaaccgggtaaggtgggcaagccgcaattctcagtagactactatgaaggttttgtgacattgacaaagaaacctgaaatggcggatgcctttacgtatatggatgctgccaatgaagcgtatatggatactagaggcagtatgttatattctcctcaatatattgaggctacgaagaaagcccatggattactaccgaatgataatccactgatgttcaatccttatttgtatccgaacgttgattggatgaacgaattattcaatgactggggacataatcgtcgtgtaaatgtaagtgtgcgtggtggggtacctaatgccacttactacgtttcattgagttattataatgaaaaaggtctgacacgtaccgctgaaatggagaactatgatgctaacatccgttacgaccgctacaattataccgctaatttgaacttgaagccaacagaaacgactactattgatttgggcttcaatggtttcctttctatgggtaactatccgcagcaatctaccagtgacttgtttgcgtcagctatggagattaatccggtctatttgccgttaatgatgcctgatggttctgtaccaggtatctctaccaatggtgacctccgtaacccgtatgccgatttgactcgtcgtggttacaaaaatgaagcaagaaatcagttgaactccaacattcgtttgacgcaagaccttggtttctggaagtggagtaaagggcttaccgcctctgccatgttggctttcgacgtgcataacagtcgtgacctgaagtataacaagcgtgaagatacttacaattttgccggaactaaagacgaaaacggattgtggaatgatgatgtatttgatgcagatggcaattatcggtatgcactgacctatacaggacataaagatcttgcatttgaccagggcgcttccgactctagaagtacttactttgaagcttctttaaattacgaccgttcgttcggtttgcatcggataggtggtcttttgctttataaccaaaagatttaccgttcgagttctgataatctgatcggttctttgccctataagcaacaaggcttggccgcccgtgctacttactcatggaacgaccgttattttttcgaggcaaaccttgggtataatggttccgagaacttcagtccagaaaaacgtttcggtttcttccctgcatttggtcttggctgggctatctctaatgaggcttggtgggaatctttgcaagaaactgtttcttactttaaagtgcgttatacagatggcttagttggtacggatgctgtaacaggacggcgttttatgtacctagaccagatggcgagcgtagatggttatcgttttggcgaccagaataacggtgttggtggttgggggttcagcaagtacggagccaatgtcggttggtctacttcccgcaagcaagacttaggtgttgacttaaaatttttcaaagacaatctttcgctgacattagatatctttaaagaacatcgtaaagacatctttattacccgacgcgttattcctgattattccgggttcgtagaaatgccttatgctaatttgggagtggtagacaataagggttttgaagctacattggaatatacacagcaactcggtaagaaatgtttcctgactgtccgtggtaacttctcatggaatgaagataaaattatagagaacgatgatccccgggtacagtatccgtggatggaaaaaagaggaacgaacgtgaacggacgttggggatggatcgccgaagggttattcactagtgaagaagagatcatggaccatgccaagcagtttggtgaagggcatccgggacagatttcgaaagtgggtgatatcaaatataaggatttaaatggtgacggagtaattgacgattatgataaatgtctgataggtcagggtgacgtacctaagatttattatggtttcggtgcagatttacaattaggtgatttctctgtcggtgcgctctttgccggaaatgccaaggcagaccgttgtttgggaggaaatgccatgtatccttttaatgatggttcaggtattacgaacttgtttgcaaacattactgacagatggtctgctgacaatccgactaatcaggatgtattctatcctcgtttgcatcatggaaacaatgcgaatcaaaataatatgaaaaccagcacatggtggcagaaagatgtcagtttcctgcgtctgaaacagttgactattgcttaccaactcccgaagaagttgattaatcaaacattcctgaagagtgcgcgtatttatgtgatgggcaccaacctattgacattctctaagttcaaattatgggatccggagttgaataccaataatggtactgcttatcctaatgtacgtacttattcagtaggtgtgaatgtaagtttttaataataatcagttagcaagaaggatatgaaaaatatatttaaaataggaactttggcgctgtgtttggtggtcggacttagttcgtgcaatgatttcttcgatgcaatccccggtgaacaatatgacttggaggatacgtttactaatcgctcgaagacagaacagtttttgaataatgtgtataattatgtgcccgatgaaacattagaacgttctgcaaggaatacgatgtcggggatctggacaaccggttcgttggaatgcaagctttcatgggacggaaataatggtagcgaatgggcttccggagccacctatgcaggttcctcatggataaacttttggtacatcgagtattataaaggaatttctcgtgccagtacatttatcatgaatgtagaccgttgtttggaagcttcggccgcacaacgcaaacagtggaaagcgcaagccagagctttgcgtgctttctattacttcatgattttccgttcctacggcccatttgtgattttgggggaagaaccaattccattggatatttctactgctgaactgctgaaagaacgtaatacggtagatgaatgtgtggcttttatggcgaaggaatttgatgatgcggcaaatgagcttcctgatagatatgacggatccaatttgggacgtatagacagagctgcatgtaaagctttcaaagcgaaaatgttgttgtatgcggcaagtccgctattcaattgtaatcccgattatgccgccatcgttaatccggaaagtggcaagcaactctttccgcaagataaatcgcaggaaaaagcgaaatgggaggctgcacgtgatgcttacaaagaattctttgatgaatacggtaacactttctctttatatacggagaagacagccgatggaaagattgatttctatgaatcttatagaaaagtgacatcgggagttttgtacggtacagagaataaagaacagattttcattcgcttggcagaccatgattaccgggcttacgaaaccacgccttatcacaaggggtacgatgataataatggtgctttgagaggtggtctgggatttggtgtacctcaggaaatggtggacttgtactttatgaaagacggtcgccggattgttgacgatacgaactataaggaatatgagggggtaccttctaatgaatatttgggatggtcgagtgactatactgacgaagtagttccttccagaacctacttcaagagcaattcgaatcaaacattgaaacaatgggctaatcgcgaaccgcgtttttatacgaacattacattccatggttctacttggttgaagacagatactccgcgtggagaaataaccacagaactgacttataacggtaattccggttatgctaatgccaattgggatgccccttacacgggttatggtatgcgtaaaatggcttcaaaagaaggacgtagcggggctaacaggcattgtgcaactttgcttcgtttggcagacatgtacttggggtatgctgaaacgttgagcgcttgtgaccaacgtaatgaagcgattaagtatgtaaataagatacgcgcccgtgccggtattcctggatatggtgcggtaggtactaaggacgataatggatttgcatgcattccttatgaagatacacgtgacggagtggacaaacgtattcatcgtgaacgtttggttgagctgatgttcgaatggaatcatttctttgatgtacgtcgttggaaagtagccgatatggctgtaggcgatgattggatttatcctaaatatcatagaggtggagaaggcggacctattcatggtatggctttccgttcggatgctcctgcattttttgagaaggtagtagtagaaacacgtacatttttgcctaaacattacctcttcccgattcctgacgaagatgtacgtcgtaatccgaagatggtacaaaatctgggatggacaacggagtaatatactccggatgtccgatctgcgaatgaatgaaagaaattaatgaaaagaaaaacaatgaagatacctcaaataagatgtagcgatgtgaatgcagtgaagagaatcatttttcttttggtgctgctaattcccttttgtctggcaggatgttcgtccgacgatgatgaaggagataatggaggagaaggtccgaacgaagatgctccggtttcttatgtacttggttcgggtaacacgaatatgccctccagtggtacaattatagcgcaatatgctgatgctcctgtcggttcggaaatcagacgtttggtagacgataatgctgacacgaagtatgttacttatcatagtagtttcaacatcacttggaatggaaatagtagtaaggctgtcactgcctattcgttgacctcggctgccgatactcccgaaatggacccgaaagattggacactctatggttctaatgataatactacgtggacagaactggatgcgcagacaaaccaactttttgcagcgagaaaagaagagaaaagctatgaagtggataatgcaacttcctatcgttactacagactttctgttgaagcgaacaatggtggtgctgccacgcagatagctgaatggaaactggtggccatgcgttcatatacggagaatatcaacgacttgattgctagtaaaggttccagtacgtttagtgcgataactccgatgggcagacagcatgagaatgacagagaagctacggcagcagacttgaaatggcttgccgatcctgctgaagaacctgaaccatttggagatggtgggacgaagatggcttggaatacattcaatgttgtatccatttatccaaatggaaatcctgtgatgtctgatgtaaatcagcgttgggtaggtgactgctgtgcttgtgcggtgattgcttcgatggcatacctctatccccgtttcgtaaaacacattatcaaggataatatggacaaaacatacacagttactatgtatgacccgaaaggaaaacaaatatcagttggtgtaggtggcgactattttatcggtaatagtggcgatttaggtgccttaggcggcagaaataaagaagtcacttgggctacgattctcgaaaaggctatgattaagtggaatcagatctatcaaggtagttctaatgtcggtggtattggtactgaatatgtttctgctatctttaccggcgacggggaaagtgtaggtttcggtgcaaatgcattgattgccgaagacttgcaacgcgcggtggaagtgtcgctcaaacagggtagactggtgatcggtggttttacaagaagcggtgaacaggtagatcaaaattggcagacgaccagtgggcatgcgtttacgtttatcttgccggatgataatactcatcttttcaagatgcggaatccttggggaggtactactgacggtgtgatgaaagtgaaggatgacggacggattccgccgatgattgacttacgtatttgtgcgccgggagcagccaagaattatggagtgggaccggacttgggaggatatatacctaatttctaatttcaaatcttaaaagaaaaacatcatgaagaaacttatttatataatgttgtcgttgtgttgcctggttttttatagttgtggcatgacggaaccttggaaagactgggaacatgaaggtgacatgagtgcagaccgcttgcgtccttcagaggtaaaagaactactgtgtgcggcagacggatggaaaatgatttatcaaggagtaacgttctactttcagtttgatgaagaaggaaatgtagcatcggattcagacgaaacgttgttgaagaatgaggttggaacagattattctctggatttccagggggaaaaagcggtgttgcttaccttgctgaatggaggaatgctacaatatttgaacgaaaactcggagacgacatttgtcattacggggtattctgattcacaaattacagctgtaggacagacgcatggcaaagaaatgatcttgactccggtctcaactgcagctttgcaacaagctaaggagagaaaacgattggccattattgcttataataaagcacaggccatggatttgcttaagggagagttgaataatggtgtatttcgtaggtcatcctcttctttccttgcacactatttgattatttgcgacgagagcaataattggaaagtgaagatttctgcaatagataacggtgtggtaaaacacacagagtatccgatgataattgatacaacgaatgatgaaaatgcagtgttgactttgggtagcaatgtgacggtagatggaataagtttaaataaactctattacaactatttgaatggtgaaattgaaactgacaatgctaatgttgtatgtgatactcggaaagcctctgatattgcagcatggtatgcagatggttggaagacccatatagtagatcaggatgagattcatgcagactttaagggaatcttccactctggtgtggagtttgatgatcgtaatccgaggaatttgattgcttgtccgtggagtggtatgggatcttatattggctttgcggttactatgacagcagataatgctactggtcgtatattcatcagcttgggcgaaccatatgatttattcggatggaataataatccggctgattataaccgtgtacagcaggattacagtaaattcctctctttctgtgtttcggaagacggcttctattggagttatgatgacaacgacagtatggtgtatgtgctaagtgctacaggcgagcgttggtttagaatgaagaagtaaccagtctttgaaaaaagcaagaaagtaaacagaacataatctcgattactttcttgcttttgtttttgtttgtactctatttgtattttcttatgggcaattatttgattattagtaatttaatttgtgctctgtttgactcctagttctctactctgacattctcgcccggacgtgctttttgtcacgttagagtatagttattaattttctattgcgttaatttgtaacgtgaataataacactcgctaatctaatattaatagtttaactcttatatcatgaataaacagaaactactgtctatcacaatgactctattgttgggagtctcctctatctttgcgcaaaagcagccggtggattacgtgaatcccctgatgggaaccgactccaagatttcgctctccaacggaaacacctatcctgccattgcactgccttgggggatgaacttttggatgccgcagaccggaaagatgggggacggttgggcttacacgtatgcttctgacaaaatcagaggtttcaagcagacccaccagcccagtccctggatcaatgactacggacagttctccattatgccgatgaccaaacagctgaagattgatcaggacagccgtgcttcctggttttcgcataaggcagagaaagcaactccttattattacagtgtttatctgtcagagtataacatgacaacggagattgccccgacggagcgttgtgcgtatttccgttttactttccccgaagcgtccgatgcttatgtggtagtagatgctttcgaccgtggttcgtatgtgaaggtgattcctgaagaaaataagattgtaggttatacgacacgtaacagtggcggtgttccgcagaatttcaggaactactttgtgatagagttcgacaagccttttacatttaataaagtatgggcggactaccatttggtagagacgcatcttgaactgcaatccaatcacgtaggtgctgccatcggtttttcgacaaagaaaggagagcaggtgcatgccaaagtggcttcctcattcatcagccccgaacaggcggaactgaatctgaaagaaatcggaaacaagacattcgaacagaccaaggaagccggacgtaaagcttggaatgacgtactgggacgtatcaaagtcgaagacgatgatgagaaccggatgcgtaccttctattcttgtctgtatcgttcggtattattcccccgtatgttccacgaagtgaatgcgaagggtgaaacggtacattacagcccttataacggtgaaatccgtccgggatatatgtttaccgataccggtttctgggatacgttccgttgcctgttcccgtttgtcaatttgatatatccttcaatgggagagaagatgcaggaaggactgttgaatacatatcttgaaagcggattcttccccgaatgggcgagtccgggacatcgtggctgtatggtcggaaacaattcggcttccgtagtggcagatgcttttatgaagaatgtgaccaaagcggatgcggagaaaatgtatgaaggtttgctcaaaggagccaacagtgtacatccgagagtttctacaacagggcgccgtggatacgaatattataataaactgggttatgtgccttacgatgtaaagattaacgagaatgcggcgcgtacattagagtatgcatacgatgactggtgcatctaccgaatgggtgaaaagctagggcgtccggcagaagaactggaactctataagagcagaagccagaactaccgcaacctgttcgaccctgaaacaaaactgatgcgtggcaagaacgccgatggcaccttccagactccttttaatccgttcaagtggggggatgcctttaccgaaggaaacagctggcactatacgtggtctgtatttcatgatgtacagggactggccgatttgatgggcggcagaaagatgtttgtcagtatgctcgattctgtgttcaaccttccaccgatatttgatgatagctactacggaggtgtgattcatgaaatccgtgaaatggaaattgccaatatgggtaactatgcgcacggcaaccagcctatccagcacatgatttacttgtataactatgcaggcgagccctggaaagcacagtactggctgcgtgaagtgatgaaccgcctctactttgccactcccgacggttattgtggtgatgaggataacggacagacttctgcctggtatgtgtttaccgctttaggcttctatccggtatgtccgggcagcaatgaatatgtgatgggtgctccttatttcaagaaagcgacgatcacactggagaacggcaagaaactggaaatctccgctcctaaaaatagtgatgccaatcgttacatccgttcgctgaactataacggtaagaactatacaaagaattatctgaatcatttcgacttgctgaaaggcggacgtctggtatttgatatggataataaaccgaataaaggaagaggtattaacgaatccgacttcccctattccttctctcgtgataacaagtaagcaggtatgaataagatgaaaaagaaagtattgatgatgactatggcggcggtaaccttgtccgccgtagctcagcaaccggtagattacgttaatccgattatcggaaccaatggtatggggcatacttttcccggtgcttgcacccctttcggatgggtacagctgagtccggacacagacacaattccacataatgtgaatggagcttatcagaagaatgcgtatgaatattgtgccggttaccagtatcgggataaaaccatcgtaggtttcagtcacacccacctcagcggcacgggacattccgacctgggagatatattgctgatgcctgctgtcggcgatgtaaaattgaatcccggacgggcggaccatccggaagagggttaccgttcgcgcttcgatcatgccacagagaaagcgacacccggatactacgaagtgatgctggacgactatggcattaaagcgcaactgacagctactcaacggacgggtgtacataaatataccttcccgaaaggaaaagacggtcatctgatcctggacctggtgcatggtatctataattatgacggcaaagtattgtgggcaaacctgcgggtggaaaacgatacattgctgacaggataccgcatcaccaacggatgggcacgtacgaattatacctattttgccatttccttgtcacagccgatcaaggattacggatataaggataaggaaaaggtattgtacaatggcttttggcgtcgtttcaagctggagaagaatttcccggaaatcactggtcgaaagatcgtggcttactttaacttcgaaacggccaaagatcccgaactggttgtaaaggtagccttgtcggcagtcagcacggaaggcgctgtaaagaacctgcgtgccgaggcttccggaaagagcttcgaacagttggcggaagctgcacggacagactggaacaatgaactggatcatttcgaaatagaaggtacaccggatcagaaggcgatgttctacacttcgctttatcataccatgattaatccgtccgtgtatatggacgtagacggttcctatcgtggtctggatcataacatacatcaggcgaaaggattcactaactatactatattctcactttgggatacatatcgcgcggaacatccgttccttaacctggtgaaaccggaacgcaatgcggatatggtggaatcaatgatcaaacatgaacagcagagcgtgcatggcatgttgccgatatggagcctgatgggaaatgagaactggtgtatgagcggttatcatgctgtgtctgtgctggcggatgcaataaccaaaggagttttttcaaatgtggatgaggcattatcggcgatggttagcacatctacggtaccttactatgaaggtgtagccgattatatgaagctgggatatatcccgctggacaagagtggtacggcagcttcctctacgttggaatatgcatacgacgactggactatttatcagacagccttgaaagccggtaataaagagatagcggatacttaccgcaaacgtgctctcaactatcgtaacatctatgatacaagcatcggttttgcccgtccccgctacagtgacggcacattcaaaaaagagttcgatgtgttgcaaacttacggcgaaggctttatcgaaggtaattcatggaacttctccttccatgtaccgcatgatgtgtttggtatgatcgacctgatgggaggagaaaagacattcgtacagaaactggacgaactcttctccatgcatctgccggagaagtactatgaacataatgaggatattacggaagaatgcctggtaggtggatacgtacatggcaatgaaccgagccatcatgtaccttatttgtacgcatggacctcccaaccgtggaaaacacagtactggctgcgtgaaatcctgaacaagatgtataagaatgacatcaacggactgggtggaaatgatgattgcggacagatgtcggcatggtatcttttctctgtgatgggcttctatccggtttgtccgggtacagaccagtatgtccttggtgctccctatctgccctatctgaagctgacacttcccaacggaaagacactggaaatcaaagcgccgggcgtcagcgacaagaagcgttatgtacagtcactgaaactgaacggcgagtcttatgataaaatgtacatcacacacgaggatatcctgaaaggaggcgtattggaatttaaaatgtcggcatcgcccaacaaacgtcgtggagtatcggcgcaggacaaaccttattcattaactaatggaatcaattaacagcatcaataaataatcaagaaaagaatatgaaaaagagacatttggtatatgcaattgccctgattgtgggcatgggagcttgtgcggcaagtgcgaagaagcaagctgaagcaaaaccggacgtatggaaaagctacaatgtaggaactgtcttgttcgaagataaagcttcggaaacaaaaggttcagacatttatcaccggatcattccggatgcggagtcttatatcaaagagcaggcacgcactgtattggctactctttataactcaccggaagacagcataactccggtgaacaagatacattatacactggaagacatcgaaggaatttctgccaaaggcggtggtaatggagacgttactatcttctacagcacacggcatatcgagaaatcatttgcggaaaacgatacggcaaagctgttcttcgaaacgcgtggggtactgttgcacgaactgacacacgcctatcagctggaaccgcaaggcatcggctcttacggaaccaatcgtgtattctgggcatttattgaaggaatggcagatgccgtacgtgtagccaacggcggattcgacggaccgaatgcccgtccgaaaggaggaaactacatggacggttatcggacagcaggttatttcttcgtctggttgcgcgacaataaagatcctgaattcctgcgtaagtttaaccgcagcacactggaggtgattccctggtcgtttgacggagctatcaagcatatcttgggaacagaatatagcatagatgaactatggcatgaatatcaggttgctgtaggtgatatacaggtgtaatatacgattggatatggttaataaagttggtagaaaaaggttgtttttggtttggtcgtgtctggtgagtatcttgccgggcatggctcaaactgaaaagctgacggactacgtgaacccgtttgtcggtacggatggttatggaaatgtttatcccggtgcacagattcctttcgggggaatccagataagccccgatacggacagccgcttctatgatgcagcttccggatacaaatacaatcatctgacattgatgggattcagtttgacgcacttgagcggaacaggtattccggacttgggcgactttctgtttatccccggaacgggagaaatgaaactggaacctggtactcatgaagatcccgatcaaggctatcgttcgcgttactcacatgataaggagtgggcgtcccccaattattatgctgtggaactggcagactatggagtcaaagccgaaatgacttccggtgtgcgtagcggtatgttccgttttacttatccagagtcggataatgcgttcatcatgattgatatgaaccatacgctctggcaatcctgcgaatggtcgaatctgcgaatgattaatgattcgactatcaccggatacaaactggtgaaagggtgggggccggaacgtcatgtgtacttcacggctactttctcgaagaagttgaccggactgcgctttgtacaagacaaaaagccggttatttataacacttcccgattccgcagttcttacgaagcctggggaaagaatctgatggcttgtatctcctttgatacaaaggcaggagaagaagtgacggtgaaaacagccatctctgcagtcagcacagacggtgcccggaataatatgaaggaactcgacggattaactttcaacgagttaagggcgaaaggggaagccctttgggaaaaggaacttggaaaatatacgttgactgctgaccgaaagacaaaggaaacgttttatacttccgcctatcatgccgctctgcatccgtttatctttcaggattcggacgggcagttccgcggactagacaagaacatagaaaaagcggaaggattcacgaactatacggtgttctctctttgggatacctatcgggctttgcatccctggtttaacttggttcagcaggaggtgaatgcggacattgcaaattctatgttggctcattacgacaagagtgtggagaagatgcttcctatctggtctttctacggcaacgaaacctggtgtatgattggctatcacgccgtatccgtattggcggatatgatcgtgaaagaagtgaaaggctttgattacgagcgtgcatacgaagcgatgaaaaccacagcgatgaatccgaactacgattgccttccggaatatcgtgaaatgggctatgtaccattcgataaggaagcggagtcagtgtcaaagacactggaatatgcttatgatgattattgcatcgcacaggcagccaagaaattaggcaaagaagacgattatcattatttcctcaaccgtgctttgtcttatcagaccttgattgatcccgaaacgaaatatatgcgcggacgcgacagcaaaggtgactggcgcactccgtttactccggttgcctatcagggtccgggatcggtacatggctggggtgatatcacggaaggattcacgatgcaatatacctggtatgtgccgcaagatgtgcagggatatatcaacgaggccggtaaggaactgttccgcaaacgcctggatgagctttttacggtagaactgccggatgatatccccggagcacatgatatacaggggcgtatcggagcctattggcatggaaatgaaccttgccatcatgttgcatacctctacaactacctgaaagaaccgtggaaatgtcagaagtggatacgtaccatcgtcgaccgtttctacggaaatacaccggatgcattgagtggtaatgacgattgcggacagatgtctgcgtggtatatgttcaactgcatcggtttctatccggtggctccgtccagcaatatttataatatcggttcgccatgcgcagaggctattacggtccggatgagtaatggaaaaaacattgaaatgacagcggacaactggtcgccgaagaacctgtacgtgaaggagctttatgtcaatggtaaaaagtacgataagtcctacctgacgtatgatgatatccgtgatggagtgaaacttcgttttgtgatgagcagcaagccgaattacaaacgggcggtgtccgatgaggctgtacctccttcgatttccttaccggagaagacgctgaagtataaatcatcaattgggttttaataaggttaggtattaagataaaaatggaaaggatgaggctgggcttcatcctttccatttttagaactgatatccgatacttataaagaacgaatgcatatagtgggatttcaatatagtcccgcttgttttactttttgctcgaaaaccattccttaaattccgctacccgtgctttgcttaccaatatcttctctgtcattctggagtggtgcagattaatggacaaccggctgttgaaccataaatcaagatcctttatcgcctcccttgaaatcagaaactgccggttgactctgaagaagagactaggattcaaacaatcgaccaactcatccagcgtaagagaaaagttgtattccaccccgtccgttaagacagcttttacctgacaatctttgatatagaacagttgaatcatgtcgatcgagacaggaagtagcttatcgccttttatcggtatgaggaaatgcgtcttataattctcctgttttttcagcgagtgaatgaggtgaagtagttcctcttccttattttcccgtctgcttccgttttcggggatggtatcctgcaagttgtccaatttttcaaacgcatgttcgatgtcctctttgccgataggtttcagcaggtagtcgatactgttcactttgaaggcacgcagggcatattcgtcgtaagccgtggtgaagataatggggcaggtgatgctgatatgatcgaatatttcgaaagcagaaccatccgccaggtgaatatccataaaaacgagttccggcatcgggtggatgtcgaaccattcgatggtggaattgatgctgtccagtatggcaataatttcagcttccggtttcacttcgttgagcagggaagtcagattgcgtacagcagctttttcatcttcaataataactgttttcataacacttggcttgtcgttcattgtacttcatcaataagaggaatgcaaacggaaaactctttgtcctctgtgatttgtatgtcctgtttgaataatagccggtagcgtttggcgagattgacaaggccgatgccggtgccggaggcagcggtccgtttgggctgaatgtcgttgcttacggacagatatccctcgttgttggtgacgatatggatagtcagtggtttgcggtcgctgatttcattgtgcttcacggcattctctatcaacacttgtaccgccatcggagggaggcggtagtcttcgaaagacttggctatctgtatatcaaactgcaagttgttctcaaaacgcatcttcagcaggaagatgtaagcagaagcgaactccatctcttcccggaggctgacgctttgcgattcgttgctttgtagcgtatacctcagtacccgtgagagttcctgaatataatcctgtgccttgtcctgattttcgcgcaccagtgaacgcagcgtattcagtgagttgaacaacatgtgcggattgagctgattcttcaatacttcatactggttgcggatgttttccgcctgtaactgttcgttctcaatcaataccagttgctggcggcggacaaggtagatgatgcagcaactgctggtgacgaggcaagccatgatgaagtcgcgcaacggatggagatagtggtgcaccatcgcatcgatggcgggaatgtcgaatgtccggtgcaggaagacaaacacttgtcccagcagattgctgagtatccatgtcaggatgaaggaaagcagaatctttgcagccgttattttaatggacgcctggttgaaatggaacaagcgcgtattgatggcaaaaagtatgagtaacgaaacgaaggtaaacagaatctcatttgccacatccataaacttcatccccgggaaaagcgaatggctttcgaaacggtcgaagagagagaccgattccggaaaatgaatgagcacagccaccatcagcgagatgatgaccgtggacaggaaatacttatctttattgatagctttcaataccatgttgcaaagataatggttaattacgaattatgcatgatgaatggctgtcgctgcacggcagattattgtttttggatatgtgccgtgacgtacatccccggtcggaactgcggattcgtctccttgatggaagcgtatacttcgagtgagcggttcacttcgtccactttttgtccgatggagatgaccgtgccgttgaacgtttgtgtacccatgccgttgacacggaattgtacgggactgcctgtttgcatatctgcaaggtctttttcgtaggtagtcaggcagagcatcggtgcgcttttatcgatcacttcgcagagagcttctcccggattgatgtactttcccatgttcatagctacattgaccacatatccgctgataggagcttttacttccagaagcggctggatgccatcccgaagcagtgtttccggattcacgcccaaaagcgaaagttgtgcggcggcagcatcctgacggcttttcatcgaaagataatccgctttgctttgctggaacttcttctgcgaagccgcttgttcggcagagagattcttttgccgttcgtattccatacgcagatattctgtttgtgcgtggctgtccagataagtctgttggagggtgataaactccggattctccaaagtggcgattacagagttcttggtaacgtgttgtccggggagtaaggaagtgtttttgatcactccgccgatagtcagtgcgacggttgcctgccgttggggcggaaggacgatccggccgttgaacgaaacctgattggggcgggaagtggcggaagtgattgcatccacttcgggctgtgcagtggcatcggcgtcgctttgaccattgttttttcccatttccggattcacgctttctgttgcagggtccgccacagactctgaatccgccgtttgttgttgtcccttgcaagctattaaggcgagcagaaggatggggtaaaatatctttctcatacacatttttatattaagtactcttgcaaaataatcttctatattaacaggaaaactgttcattaaaactctccactctccacttattcaaacaattcatgttccagagcggcaatgttatactgatagacggtttcgatataccctcgccggatgtcccgtgccgtcgtgacggactgtatgtattcggcaacgcccgtttcgctctgttgcagttgcaggttggcggctttggtcagttcttccgcttctttgagagcggaagtagtataatagcgcaggctctcgttgtatcgtcggagggaggcttccagttccatcaccttattgcgaagttcgcggatgttggcatccgcctgaatctgtgccgaagcggcagccagtctggcttgcttcaccttgcttttctggggcaggaagtaaacggggaaggagactcccaccatccatgcattcagactcttcaagggaagaatgtcctgacgggtatatcctatgctgatctccggaaagaagtggctgcgttctacatgaagcattgctttcgcttcttctgcctgactccggaagtatccggtatgcgcttcggacagattaccgtccgaaagggtggtataaaagagagacaaggtcgaatctgccggcacaatcgggctgtcggcataacagcaccactggaaacgtgccagtgccgtcttttcctcttcctgtgcctgataccagcggttgtgcaggtcggcggcggtagtcgtcatcatgttcttttcgagcagggtgatttctccttgttgataacgtatttcgccgatacgtttcaactcttccgccatcttgtcctgatcacggtacatggagcagaggttggcggcatattgatagtaagcccatgcccgttttacttccgctatcacttctttttccaccatccggcgataataagtacttgtctttacctgtcggctgaccagtgcattcttgtaaaacggagtcagcagcgaaccgaggctctgttcgaaagcaagttccttgtcttgcttgttttctccgttgagttgtccccatgagtaattgaatgaggtgggagctgcctcgacaatctctccgcgagtggcttttgcctgacggatggcgttggcggctattttcagtctcggatgattttgtttggctatctcgatggcttgttccagactgaccgcttccggttgctgcgctgaggcgaaagaaggaatcagcagcaacaacggcaggatgacgaagaacggcagatgaaacttgcttccgggacgtctccatacagcaaatgagttgacaatcttgtagaataccggaatgataagcaaagtcagcacggtagagataatcagtccgccgatgacgaccgtagccagcgggcgttgtacctcggaaccggcggaagtggcgattgccatcgggacaaatcccagcgaggcgaccagtccggtgaggaatacgggacgcagcagatgcggggtgcccagagtgaggattcggttggtagtcatagcatatttatttcgtttacgaagttcgttgaaatggttcaccatcaggataccgttcagtacagccacaccgaacaaggcgatgaaaccgactcctgccgagatgctgaacgggagtccgcgcagccagagggctacgatacctccgataagtgacagcgggacggtggagaataccatcaatgtataagtaatgttcttgaaagcgaaaaacaagatcagcagaatcagcatcagtgctaccggaatgacgatcatcagcgtattgatggcgttttgcaggttctcaaactgaccgccgtattcgaagtagtagcccggttgcagtttgatgttcttgtccagtgtcttctggatgttggctactacttgctgaatgtccgcgtcgcgtacgttcacaccaatcacgatgcggcgtttggtagcgtcgcggttgatctgcaacggaccgctgacaagttcgatgcttgccacctcgccgaccggaatctgaatgccttcggaagtacgcacaaagagcttgtccagatttaagtctgccactttctcctgatccagacgtacgacaaggtcgaacttccgttcgttttcgaaaaccacaccgctggcttctccggcataggctgtccggataatcgtgttgagttcttcgatattaatgccgtaacgggctatcttgccgcggttgtatttgacaaccagctgaggcaatcccatcgtctgctctacgatgacgtctgctgcccccggcactttctctacatacgtggcggcttcctttgccctctgataaagttcgtgcgtgtcttcgccgtataacttgactgcaatatcggctttcgcacctgtcatcagctcgttgaaccggagctgtatcggctgcgagaagttaaactcggcacgttccgagaggggttcgagcgcttctttcatcttctctaccatttccgctcggctcgttgcgctggtccattccttgaaaggtttcatgatgatcatcacgtcggcgtcttccactgccatcgggtcggtggggacttctgccgtaccgatcttcgccactacgtgcttgatttcgggaaactgatccatcaatgtcttttccgcttcttcggagagtttgatactttccgaaagtgaacttccggcgggtaaggtcatctgcatggcgaagtcgccttcgtccagtgtcgggatgaactcggcacccagacgggtgaagaggaagagggacccgatcagtgcggcaaaagcaatgacgacggtgcgtgctttgtgatgcaggcacgcatgcaggcaacgctggtagagtttgttcagctgctcgaagaatcggtcggcaagtgtcggcttcactacgatggtatgtttcaggaagagcgacgccatcatagggacgtatgtcagcgacaggatcaaggcgccgatgatgcagaacaccagggttttggccattggagtgaagtattttccttcgattccgttcaaagtcagtatcgggaagaacacgatgagaataatcagtacggcgaatgtagccgagcggactacaccggaagcacctttttccacctcttcgtccatctctttgcgggtcagtgtccgtccgcggaactgcttgctgtagatgtgtgccaggataccttccagtatgacaatggaaccatctaccacaataccgaagtcgatggcgccgaggctcatcagattggcggttacgttgaaaagacgcatcatgatgaatgcgaaaagcatagccagcgggatgaccgaagctacaatcagcccggcacggacgttgcccagaaagataataagtacgaggaagacgatgatggctccttcaataaggttgttgacgacggtggagatgttccggttgaccagttccgaacggttcagatacggttcgatgctgatgccttcgggcaataagtgctgtatcttttccacccgcttttccagttcctgcgtcactacattggcgttggcgcctttcagcatcatggcaattccgcctacgcattcgccctttccgtccatcgtcatcgcaccgaaacgtttgggggcgccgaagcggacagcgcctacgtcactgatgtgtacgggaatcccgttccggttggctaccacgatctgctcgatgtctttgatgcgggtgatcatcccttccgaacggatgtaataggcattctttgctttctcgatgtagcttccgcccgtgttctggttgttgctgctcagtgcttcgaacacttcgccgatggtgatgttcagtgaaaacagggcgtcggggtctaccgccacttcgtattgtttcagataacctccgaaactgtttatttccacgatgcccggtatgcccgataactggcgtttcaccatccagtcctgaatggtacggagttccatagcgtcatatttctcttcgtatcccggagctactttcaatatgtattggtagatttcgcccagtccggtggtgatcggcatcatttccggtgttcccagttcgggggagatttcgccggatacggtttgtatctgctcgttgatcagctggcgggcatcgagtgtgggcacgtcttccttgaagacgaccgttaccactgatagcccgaagcgactgacggaacggatatcttctacattcatgatgttgctcatcgctatttcgatgggcatggtgatgagctgctccacttcctgcggcgcaagcgtaggagatacggttacaatctgcacctgattgttggttatgtccggcacggcgtcaatggggagcgtcagcatggcatagattcccccgataaacaggaagagggtggttaaccctacgaatagttttttcctgatcgaaaaacgtacgatagctttaaacatgattttacagtgttattgtttcatgttacaaagttacggactatccttatccgtgattatcgggaaaggatgaagcggaaagattgacaggtgaaatgacgaaatcaaggtctgaacgtgaagggctgttgtctgtcgaatcaaggagtttgaacctcctttggttattcgccacaacgttttatgcagcgtttttattgtcacttgtcacttttgcgacttaatacgttgcaaattagaatggtaagggtgataataagaggtgacaatagggtgataataggcggaacttagttttctattgtcaccgcgaagaactgaagttgagaggtagaatatgctgaaaataaatgaattaaatgctgaagaagaatgtcttagatgacgaagataagtgaatccgatgttgaaaaggagtcgtttcaatgttgaaggtaagtggcttcgatgtcgatactcttaatgggtggaacaaatagtctatatagaacttttggtttctagagtttgaaactagagttccgcccgcttgaaactaaagtttcatcagcttgaaactaaggtttccaaggcatggaactgtagtttcagccgcttgaaactattggttccggcgtaggaaactatctgaaacactgcttgctaatataataataaaagaggatgcctatggggtaatgcggcatcctcttgggagacagtcctgaagaactactttcacaagcggttcttcggtctgcgacctccatatttaatctggttaggattacgaattaaagtggtgaatattgtaactcatatttgttaaaccttaaagattgctgtttcggtgatcattcaatgcttttatctttgtgcggaatgataaagttctcattatataggcagttcattttcgctctttgtgagtaggcgatcccaccaagatcggcacgtccagcagaagagttcccgtaaagtcagttgttctttgagcggaatcagaatatgtccgcgttcataggttcccagtatgtgcagattcccgttatagcaaagtatgtaaagatactcttcttcgcagattacactatgaatatgtttcatgtataaagggaaagggtggtaagggtcgtcagaagcaaattctacggaatggaaattaagtttccctagcataccggtaaatacggatgctaattcaataaacttctcgcaatcattttgtctgtgcatcttccggatgacgcggcgcaatgtttctttgtctggtctgttcatatctctttgaatatttatgaccgctcgcatcctgttgtatactacgtacgtatataaaagaagccgggcgctgagttcatatttatccgctaagaggtagtaccaatacctactgaacttaataaatatgttcacacgcccgaccctaagtcgcacgtatgaaacagatttattgaagttcagttttttgtttaaatgaaatttggtacttttcttagcgcaaaaaaacgtttcaatatgccgcatttctcttcggctttcaagggacaaaggtacgcgaattgttgaggattgcaaagaaaaaggaatgaaatttcttgctaagtatgtcatctgtgttcaataagagaagattattttgcaagagtacttaagtgcattctctgatctcagttggttgactcaatctttggaagagaaaaagtgatggcaaaatcttgaatttgcttgctatcactttgtcatcactcttgccgtcactcgattaatgaagtgattaacagtgaattaatgattgaaaaacagtaaaagtgacggatgacggcaaaaagtgtatataaactatgtagtaagatttaagtaggcaactcgcatatataacttgaattcaacttttgttgaaccattcgacatcgatacgaagaaacaagcaatcttatgctgcggcagaacatttctttgtataacctcgtttattatataacaaactaaatatatattcagtatgaagtcattcatcttaatggttataacaatggtatgtgcaatctctctggaagcgcagaataagtctttctacgacttcaatgtgaccacgattgatggtaaggaatttccgctttcttctttgaaaggaaagaaagtgctggtagtaaatgtagcctccaaatgcggactgacgccacagtatgccaaactgcaagagctatatgataaatataaggataagaattttgtaatcatcggctttcctgccaacaactttatgggacaggaaccgggaagcaatgaagagatcgctcagttctgctccttaaagtatgacgttacttttccgatgatggccaagatttccgtcaagggcaaaaacatgtcgccactttaccaatggctgacggaaaagaaactgaacggcaaagaagatgcgcccgtccagtggaattttcagaagtttatgattgacgagaacggaaactgggtcggctttgtggcccccaaagagagtccgctctcggaaaaaatcgttacttggatagagcaggagtaggagcagggaaaagagacggaataagggatactttctttaattccccttcgaagttgggggtgaaaataccttttccgaggttttcttctatttcttcgatggtccagaatcgtccgccgtccagttcgtcactggggtgcagttcaccgtcgtaaacagttttgtgaacaaagacaagttctttctcacgatccgattcgaatacatagctggttagcagttcgggagtaaagtccgtgatgcctagttcttcgcggacttcccgtttgagtgcgatttctacgctttcgcccaggtcaatatgtccgccaacggctgtgtcccattttccgggctggatgtctttccattccggacgtttctgcagatataaatctcctttcgaattgaaaacgtgaagatggatgacaggatgaaggagcttgcttccgctatggcattctccgcgtgtggcggctccggtgatgtttccctgttcgtctacgatgggaaacatttcttgattattatcgcttggcatagttgtttttactttttggtttacggtatcagcagagaagaatctccataactcagaaaacggaaatcgtgcgccagcgcataatcataaattgtgcgccagtttcccttcacgaaggcggaaaccaaaagtaacagtgtactttgcggctggtgaaagttggtcaccatcgctttcactatcttatactgatatcccggagctatgataatctgcgtactgctgtgaagggcttccagcccgttcctgtcgaggtaacctaaaatcttttgcagtgcgactacaggcggaatctgatcatacttttcgtatggctgccattgcttgacgtgcagttcttcttccgtagcatcgggattttccgccaatgttactccgatgtgatacaggctttcgagcgtacgcaccgaagtggtgcctacagcaacagcgcaaccgtcatgatcgatcagctttttgatcgtagcccgattgacggagatatactccgtatgcatctcatgcccttctatctcttcgcttttcacgggcttgaaggttcccgcgcctacatgaagtgtcagttcttccagatcgatgcctttttcctgcaatgcttccagtacacggggagtgaagtgcagtccggctgtcggtgcggctaccgagccttttattttggaataaacggtctgataagtttctttatcgctctcttccgtatcccggttcagatatgggggaatcggcagttctccgaacacttcgaggatatcggcaaaggttacttccggattgtcccaggagaaatcaatccagtggctggtgcccctgcattctccacgggtagcggtcagagtgatcgggaaaccttttaccgtcatctcccgtttcagtgctccgtctttccatttcttcaggttaccgatcatgcagagccaggcagcgtgttccgtctgctggaagttcaatacataatcgttgggctgaatcggttccagacagaagacctcgatcagcgcccccgtttctttgcggaagtggaggcgtgcctgaatcaccttcgtgttgttgaataccatcaggcttcctttcgggagatagtccggcaaggatgtgaagacatcttcgcttacttcaccgtggcgatataccaacagttttgactggtctcgtactgctaaaggaaatttggcgattcgttcatccggtagtggatagttgtattcgctgatgtgaatatgtttcgggtcttctttcattctcgtttcaataaaaaaagcatcaataacccatcgattatcaatgctttgtcggtagtcgggatgacaagattcgaacttgcgaccacacgccccccagacgcgtactctaccgggctgagctacatcccgaattgcggttgcaaaagtagtgctttatttttaaatagcaaataaatagcctgtttttttccattagctgattttaggataagtttccgtttgcggaataaaaagtcctttagtccataataattctaaataatataggtggttgcaaactaacataacagggttttgtttatgaaattaagtgaatagatagtgcgtaacttctttaaaatgaaaccatatcggcatacgagacatgagagtagtttaggatagtatatttttgtatttagttttatttaatgagggggtaaatgtgtataataaaaatagagaaacgttagaagcttatgtcttaggtgatgattttaagtattttcagaatttgaagtatcttcccctaagcgtttatccttctaatattcagtctgctttggtcgtgtattgcttcagcggaaaggccaagcttaatgtatatgatgattcgcattggatacagccgcaggaattgattattctgttgccgggacaattcgtttcgttcaccgaggccagtgatgattttctgactactacgttggtggtgtcgcctacaatgttcagcgatgcgctgagcggtgtgcctcgcttttcaccgcatttctttttctatatgaggacccattattggtatcctcagaccgaaaatgatactcggcggttgatgaatttctttggaatggtaaaggataaagtgacgtctaatgatatatacaggcgtgagctgattattcatttattaagatacttatatttggaattgtttaatgcttatgaaaaggaggcatctctgatgactacccgaaaagatactcgtaaagaggaactggctaataaattctttgggttgataatgaagcacttcaaagagaataaggatgttgctttctatgctgataagttgtgtatcacatccaaatacctgacgatggtgatcaaggaagtgagcggcaaatctgccaaagactggattgtagaatacatcgtactcgaaataaaggctttgctgaagaatacgaatatgaatattcaggaaattgccgtgaaaacaaattttgccaatcagtcgtctttgggacgtttcttcaggaaacataccggaatgtcattgtcccaataccggatgagtaacttaggataatatagaagatgcctgtggggaataaaggcatatgtggggagaggagaatgggaaagggaaagaagaaatgggaaaccttttagggaatcccattctccttcattattataataagtttcaagatcagactcccatacattcgcgatagaagtcaagcatttcaaaaattgtgtctttatcagctgtctggttgatgcaaatatctccgatctctttcagtaaagtaaaattgaccattcctgaggtatttttcttatcatgttgcataaatgcgtagagttgttcgtactgcttacagtcgaatgcgaatgaaccataattctctttgatgaattggatggtctgtcgcatcttgtctttcggaaagccgactttgaggtgtgacaggtaaagctcgcatacgattccccatgctacggcatagccatgcagcacggggcgattctcagccaatgccagactttcgaaggcatgtcctgctgtatgtcccaggttcagtgctttacggatgccatgctcgaaggggtcttgctccacaatgtcttccttcacctgtaccgatcgtcccaccatatttttgagatatgcataatcaatgttattggtattgaaatccagtaattcgacccagtgtgcggtattgctgattaatccgtgctttaacatttcagcataaccggagaagaaattctgtgcatcgaggctgcgcaggaattcagtttcaatcagcacactgtctgccggagcaaacgagcctatctcgtttttcagtccgttgaagttgatacctgtcttaccgccgacggatgcgtcgaccatagccaacagtgtagtgggtatattgatataagaaatcccccgtttgaaggtagcggcggcaaagcctcccaaatctgttaccatgcccccaccaaggttgatgagcaatgagtgacgtgtagccccttgctgactcagtgccatccatacggaggccagagtctccagtgtcttatgcacatcttcggctccgatacagatttcgactgcgtctttcagaaacgatacctctttcaatgagggcagacaaagacgctgggtatgttcgtctgtgaggatgaataacttgtcatgcggacacctttcaatggcacgaccgaggcttgtttccaagctttcgcagagaatgacttcttgtttactcatgattcttttgctttttcttggtgcaaatgtatataaaatatctttttttacttacttttgtctcgttaaaacgttcaattatgaaagcattgtttcctgtattttgccgtcctttgggatatgtggtgttgttagtagctttgtttcttcttccgattttgctaatgcaagggttgataaccgaccataacctgctattttataaggaatgtacgaagctgttgatgatggcaggatgcttgctgatcatctttgccctaagcaagaatgaaagccgcgagacggaacagattcgtaatgcggcagtccggaatgcagtctttctgacttttctgtttgttttcggtggtatgttgtggcgtgttctgcaaggagatgtgatcaatgtagacacttcttcttttctcacctttttaatctttaatgtgctttgtttggagtttggtcttaaaaaagcgcttgttgatcgattcttcaaaagataattttctattaaattaaaccttttacgattctatttgtcaaaaagacattgttattactctactaatcgtaattaaggtaaatgaaaagattatcagtttggtgggtgcttacactgttatgcaccttctctatttttgcacagaataaggtgattaccgtttcggggcgtgttgtcgaatctgactctaaagagccagctgcacaggcaactattcaattgttatcgttgccggatagcgcttatgcagccggtatagcaagtagtaataaggggtggtttacgctccctaaagtgaaagcggggaaatatttgttgaaggtttcttacatcggtttccgtacgaaattcgttcctgtacaattatccaataatgtgactgaaaagaaaatggggacaatctctctggaccctgatgcagtgatgctgagcgaggctgtgattacggcggaagctcctcctgttactgtaaaagctgatactacagagtattctgcagcggcttaccctgtaccggaaggttcaatgttagaagatcttgtgaaaaaaattccaggagctgaagtgagtgatgaaggtaaaattactataaatggtaaggaaataaaaaagataatggttgatggaaaggaatttttttctgatgacccgaaagtctctatgaagaacttacctgctaatatgattgagaaagtaaaggcttatgataaaaaaagtgatatggcacgtatcacaggaattgatgatggagatgaagagcccgtcttggatttgaccgttaagaaaggtatgaaaaaaggatggattggaaatcttattgcagggtatggtagccaggatcggtatgaagggggagtaatgatcagccgctttaaagatgatgcgagtctttcaattataggttctgcaaataatactaataataagggattttctgaatttggtgatgccggacagggactaggtggaggtaatgctggttcaggtattacaactgcacaatcgttgggagtcaacttcgctaaggatactaaaaagttgcagatcggggggaatgtacaatatggacattctgataatgacgctcgtcgcaaaacctcttcagaaacatttttgggggaaacatcttcttttgctcaaagtgagaacttttcaaatcgtaatcgccatgattttcgcgttgatttccgtttggagtggagacctgacacattgactacgattattttccgtcctaacggtagttattcacaaacagaatctagcagtcgttcttggtcaaagacagaaaataactcgcatagtcctgttaatgaaaaagaggcagcttcttcttctaaaagtcataatgcatcttttaatggtagcttgatggcttttcgaagattgaacaataaaggacgaaacttgtctttgggtgcacgtttcggatatagtgacagcgagtccgattcttattctgattcaaagactgaattcttcgaaaaggatagtatttctgatatttcgcgctatacagacagaaatagtgatagtcgtaactggagtgtatcagcttcttatacagaacctgtatttaaaaatcactttttgcagttgcgttatgaatttgctcatcgcaaacagttatcacaatcattagt
